United States Patent Application Publication US 2024/0301373 A1 - sequence listing, part 2

SEQ ID NO: 3091 - protein, 360 aa, Chlamydomonas reinhardtii
MKATQIIGVDPCGGGNWFMAARSPLYQPWAWEGVREGVSPAQRFLLELHDKQLDEELFPGQLPPEPRRRRKGVRRKGGGRKGGHRRKQSKHWQPRARTARRRRQKRGRFHMSMGHMSGLERLQPNRPQLAPALQAYVGGIPTAATASAARFEERLRYLFASGAQGQAAGQEAGQAEAAGPAEAGPRGAVHVLWHYHFSNFRRKRWAAFIQRDRALHRVAKQLTGGRPKEEVVVGWGSWAFQGGKGGSPISVRGGRAPTGRLIKLLRERYAKHVFIIDEYKTSKTCYNCGCQEMAIKRLGGLKEGQRPWSVKVCNDCLTTWNRDVSAANVIRVLLLLKLRGFERPTKLQRPPWPPAAAGPG

SEQ ID NO: 3092 - protein, 561 aa, Chlamydomonas reinhardtii
MAAELCRALLPRLAAAGLREVKGAQATYKKASTRHMEWAAEILAGLEARRDQLGAQVQQLTQAQPLTREDTQRLASLRRELHRARPFTLTPSPSFAPIYVPLDNTSMARLPGLLPTLARRHGEVFAGAGAGAVAPSSFVQAAFGGGGMQSSATLNAVGWGLFQLGGVTSRNAPFANYITTDGVACSVAREAHNKPLANLKPATAPADAEELLCTLEEMKATQIIGVDACGGGNWFMAARSPLYQPGPWAWEGVREGVSPAQRFLLELHDKQLDEELFPGQLPPEPRRRRKGVRRKGGGRKGGGRKGGHRSNRSTGGREPGQRGGGARSGADSKGVWATGVTCQAWNDSSQTTHSLRQPCRRTGAAGQAAGQEAGQAEAAGPAETGPRGAVHVLWHYHFSAFRRKRWAAFIQRDRALHRVAKQLTGGRPKEEVVVGWGSWAFQGGKGGSPISVRGGRAPTGRLIKLLRERYAKHVFIIDEYKTSKTCYNCGCQEMAIKRLGGLKEGQRPWSVKVCNDCLTTWNRDVSAANVIRVLLLLKLMGFERPTKLQRSPWPAAAAGPG

SEQ ID NO: 3093 - protein, 275 aa, Chlamydomonas reinhardtii
MSGLERLQPNRPQLAPALQAYIGGIPTAATASAARFEERLRYLFASGAAGQAAGQAAGQAAGQAAGQAAGQAAGQAAGQAAGQAAGQAAGQAAGQAEAGPRGAVHVLWHYHFSAFRRKRWAAFIQRDRALHRVAKQLTGGRPKEEVVVGWGSWAFQGGKGGSPISVRGGRAPTGRLIKLLRERYAKHVFIIDEYKTSKTCYNCGCQEMAIKRLGGLKEGQRPWSVKVCNDCLTTWNRDVSAANVIRVLLLLKLMGFERPTKLQRPPWPPPAAGPG

SEQ ID NO: 3094 - protein, 359 aa, Heterostelium album PN500
MEMDIDYPSTTTTTTTTTTTTTTTTTTPNNNNINNKYIFGIDCGRSSHVSIDEHGKTHSFSVHEHYLNLRSRFNSEAQKKMLGPAMLKFESLIPPSKNINDICLDRSLISNRISYLRLHPTTTKNYVNIRLDEYNLIMKKNNYYNKLFIGSAKFSHNSRGQSSFISSATLYKWVKKKKHKALWINECYTSKVHNACWNKTEKEILAKLNNKVSNMKDPPPCALSSGPYSKSVSIDRNQVAECHKQLSTLHQTVTGYIDGTNKVNSSTNKSNERFDYMKHHSLYSNQMSGNNVNVDGLAKDHPILKVFQEKKWKRPLCRCCGHFYHRDKNASRNILLLGLLSVRYQFRPVVFQYIKFINK

SEQ ID NO: 3095 - protein, 813 aa, Heterostelium album PN500
MVKEYKSPPPPPPSTTKTTTTTSTTSLSPPITSPSAVSPLIPTIPTLSSSSSKPIQFNYNKLSADTSATSNNNNTYDKDFKMDIDSQSTLAHVFPSPKSSMASSSQSSTTIHSTASTTNSDSSTHYYNDSDEEFNLLDYYQYCLENKLEDQAFTTPSKSTLQKNCESFLPDISFELERSSFSNSGSLYIPPPPPIPEKTSKFAFCIPNSSSSSTKSLILPTSSLSAPSSSNPPPSTTSPPPSTTSPTTTISSTKPQSSNTLPKLLKLKPSATTKSLILPTSSLSAPSPISNSLSAPSSSSNSLSAPSPTSNFLSAPSSSSNSLSAPSSSNPSPSTSNPPPSTTSPTTTISSTKPQSSNTLPKLLKLKPSATTKSLILPTSSLSAPSPISNFLSAPSPTSNPSPSTTSTTTISTTDSSRSRIETYNHVDKRPRTTNYIFQGGRFVKERDEYSLQSNNNSTALEMEMDIDYPSTTTTTTTTTTTTTTTTTTPNNNNINNKYIFGIDCGRSSHVSIDEHGKTHSFSVHEHYLNLRSRFNSEAQKKMLGPAMLKFESLIPPSKNINDICLDRSLISNRISYLRLHPTTTKNYVNIRLDEYNLIMKKNNYYNKLFIGSAKFSHNSRGQSSFISSATLYKWVKKKKHKALWINECYTSKVHNACWNKTEKEILAKLNNKVSNMKDPPPCALSSGPYSKSVSIDRNQVAECHKQLSTLHQTVTGYIDGTNKVNSSTNKSNERFDYMKHHSLYSNQMSGNNVNVDGLAKDHPILKVFQEKKWKRPLCRCCGHFYHRDKNAARNILLLGILHSNNNFISHLN

SEQ ID NO: 3096 - protein, 1581 aa, Heterostelium album PN500
MVNPTDLIRKDIIMDSGRQFFTNTLNNLENIYKRFSNNSSSYLKIKDWEEENNNNIDTLSKYNISISEYQQHNRIKSTIEKLKKTKSTDIRITEHLSTISDLYNDSETIIFIRILKKEDNNNNNNNNNNNNNNNNNNSIGPGDSEMIDISVTPTPVPVTPTPVTPTPVPVTPTPVTPTPVPVTQNSIPVHETLETTPDPHQYLWMVGLPLVIIHPLTEDRHLEDFCNYINITSTETQIDINNIKNNLYYIFKKSKSYSNSFDKSSYYTLSPSSPPSSSSSSTPTTTTTTTTTTTTTTTTTTPQTTSFDEYYLINNFLNKTNIKSSDISLSITLLKSFCNFVKESISNTPLTSKFSVTLENYIKYLSSNVISEDYFYTIQKHVFTFHLFLKIYNILSKSKVDKAKKSLNSDEAVSIETLRSIISKEELELKKPTADEINQFKKQRLCPRHLKPMEECSQTCKDEFQGYQWAVDLFSEGFFSKSKDLAKLWPKYRSTYIDDIKIQFKEPQVHDIKFSTKQPTPEPTTSNLENQDIPTQFANTPAVVSCDSNLLPIKVTDHKDIMVVMSDPISSMHLAFNREDNDLCKTFANLFKAFGIKKPSAMPTDKPSAMSIDSPAISTNDNPSVKPSEKPSTLPIDSPSARPTDKPSTLPIDNPSTMSIDKPSAMSIDKPCAMSIDKPSALPIDSPSAMSIDKPSALPTDKPSALPTDKPSALPTYKPSAMSIDKPSAMSIDKPSAMPIDKPCAMPIDSPSAMSIDKPSALPTDKPSAMPTYKPSAMSIDSPTIPPTDSPPTNYSKQSIKRKKPELSIDSPTIPPTESPTDSLSVTPTGKPLAQTKQSKKSKKQAGKPSENTPNKKQKAKQPAKQPAKVKRVYDKRVSPKKMVKEVQFKLPIGTTISMTDIYPQINLSELSIPSEEEENINQWVDTIMVGEHKIYLLCGLNAQVLFLNRAATQYEVFNITDEIKSSVPILLIKTPNYYSVAICLSHPSRPDFSKWVTEAIEFCHQFLKQGEIFKLNDIKARISKRPQRKKIYSPSWLISKEGFTPVSIYEKSAPVIRTDGISLSITRGVARRFEPKLKEQHLPYQKAGTAKERRSIETLKMAVATDGTNPICYSIDPGRSSHVSYSTDSKERRASVKQYYDWKSNRYSKKVKKLEEKFKLFQSKMPPHSNAYGRADYFIKNWEVMKLYIDFRLNNIHRQRRRLEFKLNQQSKSKLVKQLVPTTASEMKQGVIFLGASSFNHASKGHRTFISSKGLKKIFEAHGYNVVSVNEFCTSRVHHGSYVEQEMKLLSAIKRVDQHVSGPKAQWPPESKPKVNSSRGSVYEKVRNDYENLSKFESDLNSGGSMQEQQSTYDYYGHHSIYSTELSKKTTKSDQGHHSTHSTKLSRKTSKSVAKREWKKVLSKDGFLKVNVNDLNYMSNLDHAAIIKIIHEARVDCLRQLGLSERNLLPDKSRPYSVQMYIKDLSVQYMNSGELFDDLIVESGFTEKQRCGFKMCHRVRSLVPIGSQDFPANADNHNFDQPTGSTFKSIALVEVGVVAVDAITKSPVELPLPFFEKLGFSRSELETHLTKTNNSVHPTP

SEQ ID NO: 3097 - protein, 1176 aa, Heterostelium album PN500
MSDSDFYSETDSEYVSESDSETNSESDSETNSESNPPPPTTCGTRHHSLFVGQNEEPSNRPTRCKNCLTLASFLSTHKHLDKSSLCSTSYHSIITDSPSTSTNNNDICEFCQSFQTYFVKKFNTEPPIQNNNNLPPTIHSSSNALKYQIFQDLLRQRNTNQLNLFENKFSNILKNSSISHVLRDLNEQSSIITNHQLTLFGISPHEFQNHQLIENLIKDLSTTKSAQLNTTQYLSILSDLYNSPDIIISNNILLSYKVNSDKIKKRKHEDEDDTNKNNNNKNNNNNNNNEFIDNNKNKINIIESKIKTRELNLRLMLIGLPIIRLHPLTNDKHIIDYYKYIKLNNVIIDYNYICNNFIYIINKHSSSSLSLSSTTTTTTTTQDLNLINNYIFNNIEKKDISANNVAYFKPKRSHQEFGHPIPGSHLSSKFVLLSEEVVKQINKHGNKYCLEDRFIDRIRKIYPGLSSNHLWNNFHHKRQDSDPNPPESSVVTIDSLLQIANKHSISLPKPTTREITSFKANRLCPHHLSSSDKCTKDCQSVYGDYQWNFNMFINGITDNFDEFKKVLPSYRSTFTDTLNMGTLPESHLSTKVNFSNRSPTLPTNTFDLDKQQHVPHQLTNVPAVHSCDSNFMPINVKDHFDILVMTSDPISQRHLAFNKTENDICQTFKSLFINFGIPMNVKPKSPPTKKTTSSTKPSKGKKPERKFKKKNKSKTVKQQIKCPTKSLGFTDTYPRANRRLVPLETEDSVDSILMCLPHPAYKSYDKWSKEAMEFSQCFLAKKGSPIDIDSIHARMSLRPSVKGIYRPSWMTRKIGDTSIYLADYAGPEFRSNGDTLSITRAVARPFNPAVSKDKLYLPYQMPGSKREKQHVEDFRSISDTDPTCYSVDPGRSSHVSCSSHGLVRRASVNQYYSWRTNPLARLDYFNLNWSIFVEYIAFKMDPRHKYLRRINYRFGQIAKSKLVKQLIPTPASHMSGGLVFLGASEFRHNSKGHRSFISTKGLKKLLEQHQYRVVMVNEYCTSRVYHGTYLREEKNLMVAINDQCEHESLPKVEPTKWPPDNIPPVPPTNQPSTVFEKVRADYAELVEFGSDLNSQGSKQEKLLNYDYYSHYSIYSTELNLKKTQVPTRDWKRVLAKDGFLFNRDVNAARNILYLGLFMSLYSFRPKVFMSVRKYTV

SEQ ID NO: 3098 - protein, 786 aa, Heterostelium album PN500
MVKEYKSPPPPPPPSSTKTTTTTSTTSLSPPITSPSAVSPLIPTIPTLSSSSSKPIQFNYNKLSADTSATSNNNNTYDKDFKMDIDSQSTLAHVFPSPKTSMASSSQSSTTIHSTASTTNSDSSTHYYNDSDEEFNLLDYYQYCLENKLEDQAFTTPSKSTLQKNCESFLPDISFELERSCFSNSGSLYIPPPPPIPEKTSKFAFVTPNSSSSSTKSLILPTSSLSAPSSSNPSPSTSNPPPSTTSPTTTISSTKPQSSNTLPKLLKLKPSATTKSLILPTSSLSAPSPSSNFLSAPSSSSNSLSAPSSSNPSPSTSNPPPSTTSPTTTISSTKPQSSNTLPKLLKLKPSATTKSLILPTSSLSAPSPSSNFLSAPSPTSNPSPSTTSTTTTSTTDSSRSRIETYNHVDKRPRTTNYIFQGGRFVNERDEYSLQSNNNSTALEMEMDIDYPSTTTTTTTTTTPNNNNINNKYIFGIDCGRSSHVSIDEHGKTHSFSVQEHYLNLRSRFNSEAQKKMLGPAMLKFESLIPPSKNINDICLDRSLISNRISYLRLHPTTTRNYLNIRLDEYNLIMKKNNYYKKLFIGSAKFSHNSRGHSSFISSATLYKWVKKKKHKALWINECYTSKVHNACWNKTEKEILAKLNNKVSNMKDPPPCALSSGPYSKSVSIDRNQVAECHKQLSTLHQRVTGYIDGTNKVNSSTNKSNERFDYMKHHSLYSNQMSGNNVNVDGLAKDHPILKVFQEKKWKRPLCRGCGHFYHRDKNAARNILLLGILHSNNNFILTLF

SEQ ID NO: 3099 - protein, 457 aa, Eremothecium gossypii
MPIFAAKKRQATLKKKLVLQQGDELKKESLNIPSWAPFKLIDHGQAANDQVLIPQKPEVPGDALKDHWTPKTVRIYPTSKQKEILHLWLTATRHMYNLAVAERIRLGKEAKENGTKVKMKLKHLREVMPLKKNFDYERDPKLTYLKNVPFLIKDNGLRDFDKDYRTNLAKSKNTLRPFKIHFKKIKDKQSMTVEKKVWGLSRGIYHDVFRKGAFRSTEPLPEQLPHDSRLIREHGKWFLVIPYETSGLMPKKEAINAVAVDPGVRTFLTTYDSSQRVLEIGEDGYLKLQHLDRRLRSLQSEIHKLRSKGIVLSKEDRKRKIRNRRTVISRLYQRKKNLANDVHRKASHLLASKYNYILIPVLNFHNFKKTNRRVKANLANMKHCLFVQRLKNKASHFENTTVIEVDEEFTTKTCSLCGVRSNIGASKVFKCDNCDATFDRDHNAAKNILLKYLGEID

SEQ ID NO: 3100 - protein, 600 aa, Cyanidioschyzon merolae
MEAVAERACKSQGPCHRPRMNLYCAEWRAFGNFFHALSTLKEDKRQRLVPAYGAGRWASKTGCTPASPTRAYKECARRFVTFPIDEFRTSCIDHELGCTLQTLEMENCQISPDDIKKCGVLTEEQMGSRTKVRALHALVSTTNGGKKRMEFVNRDFNAAVNVRRCAVLEKRPPEWTRENFVGQSLKVELYEKKLESGVGGRSEKTGRRLHDSRRPLVEGTFTATTIHVRRRSTLERRLIASLMTQLNFVPCVRLPSQKCTRYRACRWIHASATTPVTRNPEGKLPALIVQGILAFPPTAWLLKRIGRAGVVKRAEEIGVPWRENVRELRLKWDTLEQKRARLVERDLVYPDYYVRAPFHTYPEGNLGWIPAMEVESSALAVHARLFPEAPPTQGDRLLRDTFLDRVWPRLEQLLVPMGRPLVALDLGASTGLSTMRFIDAWLARYPERPLDITGIDLSTFMLAVAELRAEERSYPSSIQVRFKHAAVENLPQKADSVDLVLCSLVTHELPMAATERLVVEAYRVLRPGGMLAMMDSDPHSEAFRSIPPVGAAIFRSTEPYFSEYERVDMVSLLTISGFTDVQTENNTPRHRVWLATKPLN

SEQ ID NO: 3101 - protein, 645 aa, Phytophthora sojae
MAGTMAASGSCRCSSKYRRMPSKKTRARPPGAEVPSRSKARIKSSKKRAPPPDAHDTGGAGPPKRRRPDVAKRKADAKTVDIVARKVTLKSFCTPEAQALHWDDVIMTMNHAAAEGWLLANFVVMHTIENPTGGGVLPPMDDKFFRRCMATVSKTSRPKKTFKTVFQKSKEKRVQPDLALKEWKWIDFERAADEYLKHRGGARRGARRLRQYVRVTYPEHRADAFLITSWVLDEACDCRHCKSCRTKKRQKKPVPTESQSCDAVNDIVGALREDIPRNQNQKVDWKSTDVLRLFHKYLKAVEEFNETNKDNPKIRQERVDSIIPTKQGFRSSYFSMTSTGLWDLLRRSRDRLDLDTIVYTEGGGSISLGDKPKAEPPLRKIENYDEIKGADPGFTDMFVACMYNVRSQTFSDDFLSYPAKKFYSDSGYSSSNRKIRRKLGLNAEIKKVFKDMPTRKTASLTKLMEYLDYTVPKMERLFSFFMTKTCRDMRFSRQVLAEKNLRDICRELAGEPGTRTLIAFDNWELNNSSGIIKKKTPGPVMKLRRMLTDYRGVDVMIVDEYLTSKMHHGCYSLAPMENQQVKHRCRDKVVRTVGVHKVYHCLKRNGGCGATVERDVNASKNMVEVALTQMREGEGVRPERLQRPS

SEQ ID NO: 3102 - protein, 366 aa, Phytophthora sojae
MLIRSGYDVPREGSDWNAVADSMWRRLFNTNLVETSKPDGSPSRFFAGEITTDGKSVSILVKKPVQGRQELQMSPETAAFFSTRWGLDPGRRDMFVATNNHGETIRCSSKEFYRDASYTQSNKTTRHWYDYADAEVSETIRLVPTKKTCSLERLEAYVRYVVLAFTMRKKFRDLRFRRYCQSRKKLHELCTRFVAGRDPTRTIVGFGDWSCSDFGGVIKKSPGGPTKRFMRELSKYCRVELESEYRTSKVHHGCRQAHPGDLVNQYQRQECRDGVVRNRKIHSVLHCLRNNGGCGITVNRDVNASRNILRAFELRLSGQARPPELSRSSQQRSTCAAVLDRRWNPRTDEVSSIDINITSGKSKYIL

SEQ ID NO: 3103 - protein, 707 aa, Phytophthora sojae
MPSKKKRARPPGSEVPNRSKARRKASKKRAPPPDAHDTGGPGPPKRRRPDVAKRKADAKTVDIVARKVTLKSFCTPEARALHWNDVIMTMNHAAAEGWLLANFVVMHTIENPTGGGVLPPMDNKFFRRCMATVSKKSRPKKSFKAVFQKSKERKVQPDLALEEWKWVDFERAADEYLKHRGGARPLDCKYICLGWFEQAATQMAKNTETSTWKNLARRLRQYVRVKYPEHRADAFLITSWVLDEACNRRHCKSCRTKKRQKKPFPAECQSCDAVNGIVGALREDIPRNQNQKVDWKSTDVLRLFHKYLKAVEEFNETNKDNPKIRQERVYNIIPTKQGFRSSYFSMTSTGLWDLLRRSSDDLDLNMIARTEDGGSISLGDSIKKENWSGVADIWWRKLFRVADLEKGTRLVFHGQICTDGIGASVLLHKPKREPKAEPPLRKIENYDKIKGADPGFTDMFVACTYSVRSQTFSDDFLSYPAKKFYSDSGCSSSNRKIRRKLGHNSEIRKVFKDMPTKKTASLTMLMEYLDYTVPKMVRLFSFFMTKTFRDMRFRRQMLAEKNLRAIRRELAGEPGTRTLIAFGNWELNNSSGIIKKKTPGPVMKLRRMLTDYRGVDVMIVDEYLTSKMHHGCYSLAPMENQQVKHRCRDKVVRTVGVHKVYHCLKRNGGCGATVERDVNASKNMLEVALTQMREGEGVRPERLQRPS

SEQ ID NO: 3104 - protein, 519 aa, Phytophthora sojae
MVVPTSMLAAAVGKRKRGTGPSRNQKLQAKRCRERNQAAAKKRKTSSGAVTTKRTPKTSPRKRKTPVKPKPTWTRTTVKMKLRPFCKDEGLALAWDSVLRDMNKMVAETYMLAAVHMVRCCEQGSDIPILARSFYQQCLSAVSGGNLHHPLATMTEEFRDSVAIYSAWRGESPIPNRDAINRGWAQVAAKRMAHETQNHLQLNFYRRFKQYITLRYGLAGRDRYLVLKGILDPEYDGDNEIVLEYRELIPRNDEGYLDQRASELLPLVHMFLTFVEDHNREHEGEPARGGSSSTGRDPTRTIVGFGDWSCSDFGGVIKKSPGGPSERFMRELSNCRVEMESEYRTSKVHHGCRQAHPGDLVNQYQRQECRDGVVRNRKIHSVLHCLRNNGGCGITVNSDLNASRNILRAFELRLSGQPRPPELTMLARYSLRLPKAAARCISSPTPALVLQQTPATSGGSAKTSVPPVSQGEKAWCDIYGIQEALHESPVAAQGSAKQVNYSTSSVNPRRARPILNVAP

SEQ ID NO: 3105 - protein, 541 aa, Phytophthora sojae
MEYASGGDLDAFLQWQQESTTEPGCRERNQAAAKKRKTSSGAVTTKRTPKTSPRKRKTPVKPKPAWTRTTVKMKLRTFCKDEGLALAWDSVLRDMNKMVAETYMLAAVHMVRCCEQGSDIPILARSFYQQCLSAVSGGNLHHPLATMTEEFRDSVAIYSAWRGESPIPNRDAINRGWAQVAAKRMAHETQNHLQLNFYRRFKQYITLRYGLAGRDRYLVLKGILDPEYDGDNEIVLEYRELIPRNDEGYLDQRASELLPLVHMFLTFVEDHNREHEGEPGFEMARTYSLLPTKRGFKRAATGTLSRTARGGSSSTGRDPTRTIVGFGDWSCSDFGGVIKKSPGGPSERFMRELSNCRVEMESEYRTSKVHHGCRQAHPGDLVNQYQRQECRDGVVRNRKIHSVLHCLRNNGGCGITVNRDVDASRNILRAFELRLSGQRRPPELSREEPLSSTAKTVPQQPPRLIILAKDSPSKKTCETRAQVAGKTRNGISVLDRKLGPPAARAQSSPSSYEELLNAERRRIQLETKALQERMRALQAAD

SEQ ID NO: 3106 - protein, 384 aa, Phytophthora sojae
MEAQRQPPDCPDWWDEEVEMLAEEAWLPVAQDFCQRSGEPYSRCIHHLAGKSFVGLRNLTNHSLRGAMPVELLPENLDIDSSIKIELSPTPEERCQLRKMFGAFRFVYNKLVDLVGDDWRRLSQAQLRADYRPVRSVTRRNLLTDHLPDWVWDVPQKILDAAFTDFLKTITTTKAGDEAARNNGENRRPSELHFKTRKNNSTSIEIQVESFGYTGHASQARFLPNYFGWRRGSDEGIATKEDFPEPTHARIKRIVKDMHQKVAKWLSVNFDVVLLPKFPVSQLVRRRNRPDGRRRRINSVTARRMLTWSHYKFRQMLDYKMKRTGGVVVVCDEPWTTKTCSHCGRINHRITVQKTFWCPECNYVCDRDVNAARNIFLKNERLIP

SEQ ID NO: 3107 - protein, 422 aa, Phytophthora sojae
MTGVPARVEELSSAQTSGSASFVARLVSDTSWIDTGQLDMGSVAKSTEPFHKKVDWKSPEVLRLFHKFLKVVEEFDETNKDNPKYDLYGAAVLVAEKSGYATIVYTEGGGSISLQNSLKDRNSSGIADIWWRKLFRTENDDEIKGANPGMTDIDSGYAGSNRKIRRKLDHNAEIKKVFKDMPTKKTASLTKLMKYLDYTVPMMERIFSFFMAKTFRDMRFRRQMLAKKNLRAICLELAGEPGTRTLIAFGNWGLTTARHHYEEDSGMMHHGCPSLAPMENQQVKHQSTIERDVNASKNMVEVALAQMRDGDADADRGELTSQFAFFFADVPPRPRYSPSRSSVLKSRIKRDLALDRHAIYDRSREPDSNGEILSISERQMHILERATANMNVMTPALVASMELHCRDFATKAANNEDMVYGM

SEQ ID NO: 3108 - protein, 1054 aa, Phytophthora sojae
MERAACRPPGRLRDWKRRYACSTVRCKLGRVCPHPELINEIQICARLILKSTTEAWALANFHVLRQCEERGDIPDLTSSTFSPGAVESSAGAFAEETTFPDDVTKIDVLHGEAGGLMSVNATNMVVTQFRKHFTLFVRLWYGISAKETRKVVRACYSSDASERREVLEMKAWLGSAAWGEDGELEQVFPRKTVIKKHVGYFVRKLYEIMVFVEQNQIEQRRQQETIQEMEEEKRTKKGKGAKKPKEKRSKTIKMFSLLPLSQSFALYNIKIDPSTLAHLCSRIYKRTGENVLGVELTPNNRIPTRPYFTQRGSELMRRAFNITQFETRRTKIGKARFNGLSVDEKARHAARFFGDSIRSDGYAASVLMVQLTRLARSVGRREENEEDEELGDADEFDDDPDSESLVTETNGEEITEDEPELEPEEDTTHEQDPSIASEVSDSAPYPAPEPALRGIRARGFVGVDPGKKAPCTAAIIGKLCSKKKKPPPPPPPSPKPPRWHRNKRCPVEDRVSSTGPPRTPVRRRREPKLPKVQHEQRILQIKAGEYQHMSGSKKFNKWHEKLRLRFPEYQIAISSLPCLKTADARVFLVRMEQVWLSLDYFLDFGIAHNFRKWRFFSHVKHRIAVDDVAKWLIPEAGAHKAMRKRATVVKVHEFRTSKLCSACYQPMKMAVFLDPNDPGPDELDADERPLYYDRSVLRCANKNCKKNFLNRDVNAAVNMQTLLMARLQGLPRPAEFAAGQEDESVIAREEADPRCIPHCGSLSRMVVRLRDDIERLDSTYEWLAAQVGALENKWAQLDAQLEASTPRSYYDRVLQELSCSGDVSLLLEALSSGPELSGASESPREHGMGEASTGRFMTLQERAEHEQAVTPLTGTIDQSGATNGSVLEAWLAMERKYRSRQGVVDQVQKLESDVAQKEFLLAAVAPERLLSRVKQTLSWVGDIGLLREALDPSAVSASKAGLRQLVLLEVGSPPRDADSSMATLEERVAKMEPAPVEKLPASRPRVVGRKRSGARAVSEGDLGLAHSEAKRPAIRSTTSRPITRSMGDRELWHG

SEQ ID NO: 3109 - protein, 578 aa, Phytophthora sojae
MTMNHAAAEGWLLANFVVMHTIENPTGGGVLPPMDDKFFRRCMATVSKKSRPKKTFKAVFQKSKEKKVQPDLALEEWKWVDFERAADEYLMHRGGARPPDCKYICLGWFEQAATQIAKNTETSMWKNLARRLRQYVRVNCRTKKRQKKPAPTECQSCDAVNDIVGALREDIPRNQNQKVDWKSTDVLRLFHKYLKAVEEFNETNKDNPKIRQERVYSIIPTKQGFRSSYFSMTSTGLWDLLRRSRDRLDLDTIVYTEGGGSISLGDSIKKENWSGIENYDEIKGADPGFTDMFVACTYNVRSQTFSDDFLSYPAKKFYSDSGYSSSNRKIRLKIGHNTEIKKVFKDIPTKKTASLTKLMEYLDYTVAKMERLFSFFMTKTFRDMRFRRQMLAEKNLRAICRELAGKPDTRTLIAFGNWELNNSSGIIKKKTPGPVMKLQRMLMGYRGVDVMIVDEYLTSKMHHRCYSLAPMENQQVKHRCRDKVVRTVGVRKVYHCLKRNGGCGATVERDVNASKNMVEMALTQMREGEGVRSERLHGQIDLRITDLNNDYPKASSTDGDFLAADGYIRMAALRSSTN

SEQ ID NO: 3110 - protein, 324 aa, Phytophthora sojae
MTAVLASRTQFFRMKNEGKKTTFPVLGFRSERARSNSIGIRTKTEGFELVDDGGKHYVQFHSKFFGASLGKGIRLSHAVPTPEHMARLIRVRGGKYYFAFSTHKEFEQSAGTRVGGMDPGVRKYLKRRYEVIDARKSRLAKLDNAAKAAAKDRESTKLHTDQKVANAKTVKPPKSREHRRRARLRREIQQTNTKITNAVIDFHHKFASWIAATFKTFLLPSFQTSLMVRKYEVEMAADGTPEKRRICSPTARRMLGLRHYSFSQILKHKMERAGGRLISCDCGKIKENLGGKEVYKCDFCGAVMDLDLNGAKNIIAHEPASYAE

SEQ ID NO: 3111 - protein, 592 aa, Spizellomyces punctatus
MPPKKKQKLERLEKLDKPTLHTCNKTSFAKAFLPNETYRQRLLDYIAIIHQLASHASHALKFYTLSAPSFTVNEETIEAILYLLNKGEAWHPRKEAKKAWRDCLLPYVQRYCQIVGFVHPNLRGEQQSVNYLTVSMMTNLKVNVQEHFMQMLLRYINLRLDVKGRKGPPKSEARKAFFARLRYLKSIFLFDIVPESLDDLTAKESELLEEMWSFIPLSDQQLAYSVAVDPLAFFPAYCKLSGLYERHGFRRFSAIPLRRSLIQSHIRIDTVILYAHILCITRQEAEAVEKVDLWLRVCNLQNKAFRSRRRMWFEGSITTDGTSVSVYLKHPEADKYGKRSGGKKSANTMEAEVKALYVENNLSACQENFVVIDPNKRDLLYCQDSNGTTFRYTANQRAMETGSRRFAREREAMKAGGIDLIESRISSHKTMNLIDFMRYLLVRRADWDRRKEFYAHPAHTRWKWHASINRQKSESNLISNLHNKYGENFTIVMGDWSDAGRTARFQISSKTKGFKTRAHSRPYRRREGKVEKVHGLLGCTNPNCLQQAWTSGMRYWNRDTLSTCNMLMIVRSMLDGHCRPEVFSRRSVPAVA

SEQ ID NO: 3112 - protein, 638 aa, Spizellomyces punctatus
MPPKKKQKLERLKKLDKPTLHTCNKTSFAKAFLPNETYRQRLLDYIAIIHQLADHASHALKFYILSTSTSSFPVVHEDTIEAILYLLNKGEAWHPRKEAKKAWRDCLLPYVQRYCQIVGFIHPNLRGEQQSINYLTVSMMTNLKVNVQEHFMQMLLRYINLRFDVKGQKQRLPPKSDARKAFFTRLRYLKSVFLFDVVPELEFLDDLTPLESEVLEEIWSLDLPFLPNDPLAYAIVADPMSFFPAYCKLSGLYEQYGFQRFSAIPLRRSLIQSHVRIDTIILYQHILCITRRDAETVEKDDLWMRVCNLCTKAFRSRCGMHFEGSITTDGASVSVYLKHPEADKYGKRGARKSANTVAAEVKALYVENNLPACRAAENVVVIDPNKRDILYCQDSNGTTFRYTANQRAVETGSRRFAKRREAMKEEAGVDLIESRIPSHKTMNLMDFTRYLLVRRADWDRRKEFYSHPAHTRWKWHSFINRQKSESDLISNMRNKYGENFTVVMGDWSDAGRTARFQTSSKTKGWRTLFKRNRIDCFLLDEYKTSSVCPRCSSSEFVEKKFKTRPHSRPWRRREGKIEKVHGLLGCTNPNCLQQAWTSGMRYWNRDMLSTCNMLLIVRSMLDGHGRPEVFSRSVPAVA

SEQ ID NO: 3113 - protein, 592 aa, Spizellomyces punctatus
MPPKKKQKLEKLDKPTLHTCNKTSFAKAFLPNETYHQRLLDYIAIIHQLADHASHALKFYILSAPTFPTVNEDTIEAILYLLNKGEAWHPRKEAKKARRDCLLPYVQQYCRIVDFPHPNLHGEQQSINYLTASMMTNLKVNVQEHFMQMLLRYINLRLDVKGHKQRLPPKSDARKAFFTRLRYLKSVFLFDIMPESLDDLTAEESELLEEMWTLNLPFPDQDKPLAYSVTVDPLAFFPAYCRLSSLYEKHGFRRFSAIPLRRSLIQSHVRIDTVILYSHILCITRRDAEAVEKVDLWMRICNLRTKAFRSRRGMQFEGSITTDGTSVSVYLKHPEADKYGKRSGGKKSATTLTAEVTALYVEKNLPACRAAENVIVIDPNKRDILYCQDGNGTFRYTANQRAVETGSRRFAKERQRMKAGGIDLIESRIPSHKTMNLMDFTRYLLVRRADWNRRKDFYSHPAHTRWKWHAFINRQKSESNLISNLRNKYGENFTIVMGDWSDAGRTARFQTSSKTKGFKTRPHSRPWRRREGKIEKVHGLLGCTNPNCQQAWTMRYWNRDTLSTCNMLIIVQSMLDGHSRPEVFSRSVPAVA

SEQ ID NO: 3114 - protein, 238 aa, Spizellomyces punctatus
MHYHTANQRAVETGSRRFAKERQRMKAGGIDLIESRIPSHKTMNLIDFMRYLLVRRTDWDRRKEFYSHPAHTRWKWHAFINRQKSESDLISNMRNKYGDNFTVVMGDWSDAGRTARFQTSSKTKGWRTLFKRNRINCFLLDEYKTSSVCPHCLASSADFLEKGFKTRPHSRPWRRREGKIEKVHGLLGCTNPNCQQAWTMRYWNRDTLSTCNMLMIVQSMLDGHGRPEVFRRGVPVVA

SEQ ID NO: 3115 - protein, 628 aa, Spizellomyces punctatus
MPPKKKQKLENPTCLHTCNKTSFAKAFLPNDIYRQRLLDYIAIIHQLADHASHALKFYILSAPSFPTLDQDTIEAILYLLNKGEAWQPKADAKKALRGCLVPYIRRYCHIVSFVHPNLQKEQQSINYLTASMMTNLKVNVQEHFMQMLLRYINLRLDVKGQKQRLPLKSDARKAFFTRLRYLKSVFLFDIVPESLDDLTAEESELLEEMWSFIPLSDQPLAYSVAVDPLAFFPAYCKLSVLYERHGFRRFSAIPLRRSLIQSHIRIDTVILYQHILCITRREAETVEKVDLWLRICNLRNKAFRSRRGMCFEGSITTDGTSVSVYLKHPEADKYGKRSGGGKKSANTMEAEVKAQYVEKNLPACRVAENVVVIDPNKRDILYCQDSIGTTFRYTANQRAMETGSRRQQKERQQMKKGEIDLIESRIPSHKTMNLMDFTRYLLVRRADSDRRKEFYSHPAHTRWKWHSFINRQRSESDLISAMRNKYGENFTVVMGDWSDAGRTARFQTSSKTKGWRTLFKRNRINCFLLDEYKTSSVCPHCSSDDFLEKGFKTRPHSRPWRRREGNVEKVHGLLGCTNPNCLQQDWTSGMRYWNRDTLSTCNMLMIVQSIMDGHGRPEVFSRSVPAVA

SEQ ID NO: 3116 - protein, 632 aa, Spizellomyces punctatus
MPPKKKQKLEKLDKPTCLHTCNKTSFAKAFLPNETYRQRLLDYIAIIHQLADHASHALKFYILSAPTFPTVNEDTIEAILYLLNKGEAWHPRKEAKKAWRDCLLPYVQRYCQIVGFVHPNLRGEQQSVNYLTASMMTNLKVNVQEHFMQMLLRYINLRLDVKGQKQRLPLKSDARQAFFTRLRYLKSVFLFETMPESLDDLSILENEILEEIWTLNLPFPDQDKPLAYLIAIDAMSFFPAYCRLSKLFEQQGFQQFSAIPLRRSLIQSHIRIDTVILYAHILCITRQEAEAVEKVDLWLRVCNLRTKAFRSRCGMHFEGSITTDGTSVSVYLKHPEADKYGKRGARKSAKALAAEVKALYVENNLPACRAAENVVVIDPNKRDILYCQDSNGTTFRYTANQRCKETGSRRFAKERQRMKAGGIDLIESRIPSHKTMNLIDFMRYLLVRRADWDRRKEFYSHPAHTRWKWHAFINRQKSESDLISNMRNKYGENFTIVMGDWSDAGRTARFQTSSKTKGWRTLLKRNRINCFLLDEYKTSSVCPRCLASSDDFLEKDFKTRPHSRPWRRREGKIEKVHGLLGCTNPNCQQAWTMRYWNRDTLSTCNMLMIVQSMLDGHGRPEVFSRRSVPAVA

SEQ ID NO: 3117 - protein, 632 aa, Spizellomyces punctatus
MPPNKKQKLDNRPTCLHSCNKTSFAKAFLPNETYRQRLLDYIAIIHQLADHASHALKFYLLSAPTFPTVNEDTIEGILYLLNKGEAWHPRKEAKKAWRDSLLPYVQRYCQIVGFVHPNLRGEQQSINYLTASMMTNLKVNVQEHFMTMLLRYINLRLDVKGRKGQFPPKSEVRKAFFARLRYLKSIFLFDVVPESLDDLTAEESELLEEMWSLDLPFLPNNPLAYAIVADPMSFFPAYCKLSGLYERYGFRRFSAIPLRRSLIQSHVRIDTIILYQHILCITRPEAEAVEKDDLWLRVCNLCTKAFRSRRGMQFEGSITTDGTSVSVYLKHPDADKYGRRGGGKKSAKTMEAEVKAVYVENNLPACRAAENIVVIDPNKRDILYCQDSNGATMFRYTANQRCRETGSRQFAKRREAMKKEAGIDLIDSRIPSPKTMNLMDFMRYLLVRRADWDRRKEFYSHPAHTRWKWHSFINRQRSESDLISNMRDKFGNFTVVMGDWSDAGRTAKFQTSSKTKGWRILFRRNRINCFLIDEHKTSSVCPRCLASYNDFLEKDFKQRPHSRPWRRREGKVEDVHGLLGCTNPNCLQQDWTTMRYWNRDTLATCNMLTIVQSMLDGHGRPERFSRSVPAIA

SEQ ID NO: 3118 - protein, 629 aa, Spizellomyces punctatus
MPPKKKQKLEKLDKPTCLHTCNKTSFAKAFLPNETYRQRLLDYIAIIHQLADHASHALKFYILSAPTFPTVNEDTIEAILYLLNKGEAWHPRKEAKKAWRDCLLPYVQRYCQIVGFVHPNLRGEQQSVNYLTASMMTNLKVNVQEHFMQMLLRYINLRLDVKGQKQRLPLKSDARQAFFTQLHYLKSVFLFETMPESLDDLSILENEILEEIWTLNLPFPDQDKPLAYLIAIDAMSFFPAYCRLSKLFEQQGFQQFSAIPLRRSLIQSHIRIDTVILYAHILCITRQEAEAVEKVDLWLRVCNLRTKAFRSRCGMHFEGSITTDGTSVSVYLKHPEADKYGKRGARKSAKALAAEVKALYVENNLSACQENIVVIDPNKRDILYCQDNKGTIFRYTANQRCMETGSRRFAKERQRMKAGGIDLIESRIPSHKTMNLIDFMRYLLVRRADWDRRKEFYSHPAHTRWKWHAFINRQKSESDLISNMRNKYGENFTIVMGDWSDAGRTARFQTSSKTKGWRTLFKRNRINCFLLDEYKTSSVCPRCLASSDDFLEKDFKTRPHSRPWRRREGKIEKVHGLLGCTNPNCQQAWTMRYWNRDTLATCNMLTIVQSMLDGHGRPEVFSRGVPAVA

SEQ ID NO: 3119 - protein, 535 aa, Spizellomyces punctatus
MPPKKKQKFDNRPTCLHSCNKTSFAKAFLPNGTYRQRLLDYIAIIHQLADHASHALKFYLLSAPTFPTVNEDTIEAILYLLNKGEAWHPRKEAKKAWRDCLLPYVQRYCQIIGFVHPNLRGEQQSVNYLTASMMTNLKVNVQEHFMQMLLRYINLRLDMKGQKQQLPPKSNVRKDFFARLRYLKSIFLFDIVPESLDDLTAEESELLEEMWSFIPLSDNQPLAYSVAVDPLAFFPAYCKLSGLYERHGFRQFSAIPLHRSLIQSHVQIDTIVLYQHILCITRREAETVEKVNLWLRVCNLRTKAFRSRRGMQFEGLIMTDGTSVSVYLKHPGADKYGKRGARKSAKSLEDEVKAQYMEKNLPACRAAENVIVIDPNKHDILYCQDNSGMTFRYTTNQRAVETGSRRQQRQWQQMKKEAGVDLIESRIPSQKMMNLIDFMRYLLVRRADWDRRKEFYSHPAHTRWKWHAFINRQKSESDLISNMRNKYGENFTIVMGDWSDASRTARFQTSSKTKGWRTLFKRNRINCFLLDEYKT

SEQ ID NO: 3120 - protein, 493 aa, Spizellomyces punctatus
MTNLKVNVQEHFMMMLLRYINLRLDVKRQKQRLPLKSDARNAFFARLRYLKSIFLFDIVPESLDDLTAEESELLEEIWSLSIPLSDDQPLAYSVAVDPLAFFPAYCKLSRLYEHHGFRRFSAIPLRRSLIQSHVRIDTIILYSHLLCITRREAETVEKVDLWLRVCNLQNKAFRSRRGMCFEGSITTDGTSVSVYLKHPEADKYGKRSGRGKKSAKALAAEVKALYVENNLSACQENIVVIDPNKRDILYCQDNKGTIFRYTANQRCKETGSRRFAKERQRMKTGGIDLIESRIPSHKTMNLMDFTRYLLVRRADSDRRKEFYSHPAHTRWKWHAFINRQKSESNLISNLRNKFGNFTIMMGDWSDAGRTARFQTSSKTKGWRTLFKRNRIDCFLLDEHKTSSVCPRCSSSEFVEKEFKERPHSRPWRRREGKMEKVHGLLGCTNPNCLQQAWTMRYWNRDMLATCNMLTIVQSMLDGHGRPKVFSRGVPAVA

SEQ ID NO: 3121 - protein, 268 aa, Spizellomyces punctatus
MTDSTSVSVYLKHPEADKYGKHSGRGKKSANKMEAEVKALYVENNLPACQAAENIVIIDPNKHDLLYCQDSNGATMFRYTANQCCKETDSDHRKEFYSHPAHTQWKWHAFINRQKSESNLISNMRNKFGNFTIVMGDWSDAGRTARFQTSSKTKGWRTLFKRNRINCFLLDEYKTSSVCPHCLASSADFLEKGFKTRPHSRPWRRREGKIEKVHGLLGCTNPNCQQAWTMRYWNRDTLSTCNMLMIVQSMLDGHGRPKVFSRGVPAVA

SEQ ID NO: 3122 - protein, 580 aa, Spizellomyces punctatus
MPPKKKQKLERLEKLDKPTCLHTCNKTSFAKAFLPNDIYCQRLLDYIAIIHQLADHASHALKFYLLSSSAPVFPTVNQETIEAILYLLNKGESWQPKTGAKKALRESLLPYIQRYCNIVGFVHPNLQKEQQSVNYLTASMMTNLKVNVQEHFMMMLLRYINLRLDVKGQKQRLPLKSDARNAFFARLRYLKSIFLFDIVPESLDDLTAEESELLEEMWSFIPLSDQLLAYSVAVDPLAFFPAYCQLSSLYEQHGFRQFSAIPLRRSLIQSHVRIDTVILYSHVLCITRREAETVENVDLWLRVCNLQNKAFRSRHGMCFEGSITTDGTSVSVYLKHPEADKYGKRSGGKKSANTMEAEVKALYVEKNLPACRAAENVIVIDPNKRDILYCQDSNGTAFRYTANQRAMETGSRRFAKRREAMKKEAGVDLIESRIPSHKTMNLMDFTRYLLVRHHADSDRRKEFYSHPAHTRWKWHSFINRQRSESDLISNMRNKPHQGRKAGAPSLSATGSTASFSTSTRPHLFALAVPLALKKASKHDLIQDLGGDAKARLKKSTDCWVVPTLTVCSKPGRCATGIEIR

SEQ ID NO: 3123 - protein, 627 aa, Spizellomyces punctatus
MPSKKKQKLEKLDKPTCLHTCNKTPFAKAFLPNEIYRQRLLDYIAIIHQLADHASHALKFYILSAPSFTVNEETIEAILYLLNKGEAWQPKTDAKKALRRCLLPYIQRYCHIIGFVHPNLQKEQQSVNYLTVSMMTNLKVNVQEHLMQMLLWYINLQLDVKGQKQRLPLKSDARKAFFTRLRYLKSVFLFETMPESLDDLSILENEILEEIWTLNLPFPDQDKPLAYLIAIDAMSFFPAYCRLSKLFEQQGFRQFSAIPLRRSLIQSHVRIDTVILYSHVLCITRREAEAVEKVDLWLRVCNLRTKAFRSRCGMHFEGSITTDGTSVSVYLKHPEADKYGKRSGGKKSANTMEAEVKALYVENNLSACQENFVVIDPNKRDLLYCQDSIGTTFRYTANQRAVETGSRRFAKRREAMKKEAGVDLIESRIPSHKMMNVMDFTRYLLVRRADSDRRKEFYSHPAHTRWKWHAFINRQKSESNLISNMHNKFGRNFTIVMGDWSDAGRTTRFQTSSKTKGWRTLFKRNRIDCFLLDEYKTSSVCPHCSSDVEKGFKTRPHSRPYRRREGKIEKVHGLLGCTNPNCQQDWTMRYWNRDTLSTCNMLMIVQSMLDGHCRPEVFSRRSVPAVA

SEQ ID NO: 3124 - protein, 568 aa, Spizellomyces punctatus
MPPKKKQKLEKPTCLHTCNKTSFAKAFLPNYHQRLLDYIAIIHQLADHASHALKFYILSAPSFTVNEETIEAILYLLNKGEAWHPRKEAKKAWRDCLLPYVQRYCQIVGFVHPNLRGEQQSVNYLTASMMTNLKVNIQEHCMTMLLRYINLRLDVKGRKGQLPPKSDARKAFFTRLRYLKSVFLFDIVPESLDDLTAEESELLEEIWTLNLPFPDQDKPLAYLIAIDAMSFFPAYCRLSSLYEKHGFRRFSAIPLRRSLIQSNIRIDSKILYQHILCITQREAEAVEKVDLWLRVCNLRTKAFRSRCGMHFEGSITTDGTSVSVYLKHPEADKYGKRSGGKKSANMMEAEVKVQYVEKNLPACRAAENIVVIDPNKRDILYCQDSNGTTFRYTANQRAMETGSRRFAKRREAMKKKAGIDLIESRIPSHKTMNLMDFTRYLLVRRADWDRRKYFYSHPAHTRWKWHAFINRQKSESNLISNLRNKYGENFTIVMGDWSDAGQTARFQTSSKTKGWRTLFTTALIVFFLMNTRPHLFALAVHPLSLLRKASKNDLIQDLGGDMKASKPG

SEQ ID NO: 3125 - protein, 605 aa, Spizellomyces punctatus
MPPKKKQKLERLEKLDKPTCLHTCNKTSFAKAFLPNYHQRLLDYIAIIHQLADHASHALKFYILSAPTFPTVNEDTIEAILYLLNKGEAWQPKTDAKKALRKCLLPYICQYCRIGFVHPNLRGEQQSINYLTASMMTNLKVNVQEHFMQMLLRYINLRLDVKGQKQQLPPKSDVRKAFFARLRYLKSIFLFDIVPESLDDLTAEESELLEEMWSFIPLSDQPLTYSVAVDPLAFFPAYCRLSSLYEKHGFRRFSAIPLRRSLIQSHVRIDTVILYSHILCITRRDAEAVAKVDLWMHICNLRTKAFRSRRDMQFEGSITTDGTSVSVYLKHPNADKYGKRGARKSAKTLEAEVKARDILYCQDGNGTTFRYTANQRAMETGSRRQRKEQQQMKKEVGMDVIESRIPSHKTMNLMDFTRYLLVRRADSDRRKEFYSHPAHTRWKWHSFISRQRSESDLISAMHNKYGENFTIVMGDWSDAGRTARFQTSSKMKGWRTLFKRNRIDCFLLDEHKTSSVCPRCSSSEFVEKEFKERPHSRPWRRREGKMEKVHGLLGCTNPNCLQQAWTMRYWNRDTLATCNMLTIVQSMLDGHGRPEVFSRGVPAVA

SEQ ID NO: 3126 - protein, 492 aa, Spizellomyces punctatus
MMTNLKVNVQEHFMQMLLRYINLRLDVKGQKQRLPLKSDARKAFFTRLRYLKSVFLFDTVPELLDLTPLESEVLEEIWSLDLPFLVDNPLAFAVVVDPMSFFPAYCRLSSLYEKHGFRRFSAIPLRRSLIQSHIRIDTVILHQHILCITRQEAEAVAKVDLWLRVCNLQNKAFRSRHGMCFEGSITTDGTSMSVYLKHPDADKYGKRGARKSAKTLEAEVKAVYVENNLPACRAAENVIVIDPNKRDILYCQDSNGTTFRYTANQRCKETGSRRIAKRREAMKAGGIDLIESRIPSHKTMNLMDFTRYLLVRRADSDRRKEFYSHPAHTRWKWHAFINRQKSESNLISNLRNKFGNFTIVMGDWSDAGRTARFQTSSKTKGWRTLFKRNRIDCFLLDEYKTSSVCPHCSSDVEKGFKTRPHSRPYRRREGKIEKVHGLLGCTNPNCLQQAWTMRYWNRDTLSTCNMVTIVQSMLDGHGRPEVFSRRSVPAVA

SEQ ID NO: 3127 - protein, 234 aa, Spizellomyces punctatus
MDGTSVSVYLKHPEADKYGKRSGGKKSATTLTAEVTALYVEKNLPACRAAENVIVIDPNKHDILYCQDGNGTFRYTANQRAMETGSRRFAKERQQMKAGGIDLIESRIPSHKTMNLMDFTRYLLVRRADWNCRKDFYLHPAHMRWKWHAFINRQKSESDLISNMRNKFGNFTIVMGDWSDAGRTARFQTSSKMKGWRTLFKWNRINCFLLDEYKTSSVCPRCSSSEFVEKGFKE

SEQ ID NO: 3128 - protein, 600 aa, Spizellomyces punctatus
MPPKKKQRLEKLDKPTCLHTCNKTSFAKAFLPNDIYCQRLLDYIAIIHQLADHASHALKFYILSAPTFPTVNEDTIEAILYLLNKGEAWHPRKEAKKAWRDCLLPYVQRYCQIVGFVHPNLRGEQQSVNYLTVSMMTNLKVNVQEHFMQMLLRYINLRLDVKGRKGPPKSEARKAFFARLRYLKSIFLFDIVPESLDDLTAKESELLEEMWSFIPLSDQPFAYSVAVDPLAFFPAYCKLSGLYERHGFRRFSAIPLHRSLIQSHIRIDTLILYAHILCITRREAEAVEKVDLWLRICNLQNKAFRSRHGMCFEGSITTDGTSVSVYLKHPEADKCGKRGARKSAKSLEDDVKAQYVEKNLPACRAAENVIVIDPNKRDLLYCQDNSGTTFRYTANQRAVETGSRRFAKRREAMKEEAGVDLIESRIPSHKTMNLMDFTRYLLVRRADWDRRKEFYSHPAHMRWKWHSFINRQRSESNLISNLRNKFGNFTIVMGDWSDAGRTARFQTSSKTKGWSTLFKRNRIDCFLLDEYKTSSVCPRCSSSEFVEKKFKERPHSRPYRRREGKVEKVHKRGTLYDHVTSISGCPGNAHSEQATSSLAS

SEQ ID NO: 3129 - protein, 392 aa, Spizellomyces punctatus
MSFLPAYCRLSSLYEKHGFQRFSAIPLRCSLIQSHIRIDTVILYAHILCITRQGAEAVEKVDLWLRVCNLRNKAFRSRRGMQFEGSITTDGTSVSVYLKHPEADKYGKRGARKSAKSLEDEVKVQYMEKNLPACRAAENVVVIDPNKRNILYCQDNSGVTFRYTANQRAMETGSHRFAKERQQMKKEAGIDLIESYIPSHKTMNLMDFMRYLLVCHHADSDCRKEFYSHPAHTRWKWHSFINQQQSESNLISNLCNKYGENFTIVMGDWSDAGRTARFQTSSKTKGWRTLFKRNRINCFLLDEYKTSSVCPHCSSGIEKGFKTRPHSRPWRRREGKIEKVHGLLGCTNPNCQQAWTMRYWNRDTLSTCNMLMIVQSMLDGHGRSEVFSLFQP

SEQ ID NO: 3130 - protein, 217 aa, Spizellomyces punctatus
MKEEAGVDLIESRIPSHKTMNLMDFTRYLLVRRADWDRRKEFYSHPAHTRWKWHSFINRQKSESDLISNMRNKYGENFTVVMGDWSDAGRTAKFQTSSKTKGWRTLFKRNRINCFLLDEYKTSSVCPRCSSSEFVEKGFKERPHSRPWQRGKVEKVHGLLGCTNPNCLQQDWTLRMRYWNRDTLATCNMLTIVQSMLDGHGRPEVFSRSSRSVPAVA

SEQ ID NO: 3131 - protein, 627 aa, Spizellomyces punctatus
MPPKKQRLEKLDKPTLVTLHTCNKTSFAKAFLPNEIYHQRLLDYIAIIHELADHASHALKFYILSAPSFPMVDQDTIEAILYLLNKGEAWHPRKEAKKAWRDCLLPYVQRYCQIVGFVHPNLRGEQQSVNYLTASMMTNLKVNIQEHFMTMLLRYINLRLDVRGRKGPPKSEARKAFFARLRYLKSIFLFDIVPELLDDLTAEESELLEEIWSLDRPFLVDNPLAYAVVVNPMSFFPAYCRLSSLYEKHGFRQFSAIPLRRSLIQSHVRIDTIILYQHILCIARREAETVEKVDLWLRVCNLRNKAFRSRRGMCFEGSITTDGTSVSVYLKHPEADKYGKRGGGKKSAKTLEAEVKAVYVENNLPACRAAENFVVIDPNKRDLLYCQDNKGTIFRYTANQRCKETGSRRFAKERQRMKAGGIDLIESRIPSHKTMNLMDFTRYLLVRRADSDRRKEFYSHPAHTRWKWHAFINRQKSESDLISNMHNKFGNFTIVMGDWSDAGRTARFQTSSKTKGWRTLFKRNRINCFLLDEYKTSSVCPCCSSDVEKGFQTRPHSRPYRRREGKIEKVHGLLGCTNPNCLQQAWTSGMRYWNRDTLSTCNMLMIVQSMLDGHGRPEVFSRSRSVA

SEQ ID NO: 3132 - protein, 625 aa, Spizellomyces punctatus
MPPKKKQKLEKLDKPTLHTCNKTSFAKAFLPNETYRQRLLDYIAIIHQLADHASHALKFYILYAPTFPTVNEDTIEAILYLLNKGEAWHPRKEAKKALRGCLLPYIRRYCQIVGFIHPNLRGEQQSINYLTASMMTNLKVNIQEHFMQMLLRYINLRLNVKGRGRLPLKSDARKAFFARLRYLKSIFLFDVMPESLDDLTAEESELLEEMWSFIPLSDQPLAYSVAVDPLAFFPAYCKLSVLYERHGFRRFSAIPLRRSLMQSHIRIDTVILYQHILCITRREAETVEKVDLWLRVCNLRNKAFRSRRGMQFEGSISTDGTSVSVYLKHPEADKYGKGARKSAKSLEDEVKVQYMEKNLPACRAAENIVVIDPNKRDILYCQDSNGTTFRYTANQRAMETGSRRQRKERQQMKKEAGIDLIESRIPSHKTMNLMDFTRYLLVRRADSDRRKEFYSHPAHTRWKWHAFINRQKSESDLISNMHNKFGNFTIVMGDWSDAGRTARFQTSSKTKGWRTLFKRNRINCFLLDEYKTSSVCPHCLASSADFLEKGFKTRPHSRPWRRREGKIEKVHGLLGCTNPNCQQAWTMRYWNRDTLSTCNMLMIVQSMLDGHGRPKVFSRGVPAVA

SEQ ID NO: 3133 - protein, 581 aa, Spizellomyces punctatus
MPPKKKQKLDNRPTCLHSCNKTSFAKAFLPNGTYRQRLLDYIAIIHQLADHASHALKFYILSAPTFTVNEETIEAILYLLNKGEAWHPRKEAKKAWRDCLLPYVQRYCQIVGFVHPNLRGEQQSVNYLTASMMANLKVNVQEHFMQMLLRYINLRLDVKGHKQRLPLKSDARQAFFTRLCYLKSIFLFDIVPESLDDLTAEESELLEEMWSFIPLSDQPLTYSVAVDPLAFFPAYCRLSSLYEKHGFRRFSAIPLRRSLIQSHVRIDTVILYSHILCITRRDAEAVAKVDLWMRICNLRTKAFRSRHDMQFEGSITTDGTSVSVYLKHPEADKYGKRGARKSAKALAAEVKVLYVENNLSACQENIVVIDPNKRDILYCQDNKGTIFRYTANQCCKETGSRRFAKERQRMKAGSIDLIESRIPSHKTMNLIDFMRYLLVRCADWDRRKDFYSHPAHTRWKWHAFINRQKSESNLISNLCNKYGENFTIVMGDWSDAGRTARFQTSSKTKGSTASFSTSIKPHLSALTVHPMTSLKKVSKHDLIQDLGDDEKARLKKSMDCWVVPTLTVSKPGRCATGIEIR

SEQ ID NO: 3134 - protein, 1534 aa, Salpingoeca rosetta
MQNPACNQLSQACCARITGRIVRHVQTLTKMFRRVIIVDETPTAYKLRDSGTPSCLVRQLRAAIEQKTSAEFTTAPGEADHQLAAMLRRKEIHVALFPSSDSDMLLHDAGDGIIVFRHTLQRKAGRVRLRGVCIRKRHKLCMADGIVAILAGCDVFKRAATADTTAAATADTTADTTATATADTTDADTADTTTTAATAAATANRLGFWPAVAAVDRHIRADGDFIASAVAFFCGPVHLDGREQMLAPMPDNFTTLRPPLNQDNDPHQHCIPGRVRVMKNTSRRTGKRVFRRISKQIHTSMQLAQESPRVPQRVQEREAGKQVQTRAQTKEQKKQRAETHVTGRKKKKEDTKKKKKNTKKKDTASVDGGDDARSFFWHADTAAVIPEPASPATPQAKAETPVQLQHQWGLVSVVPHGHDTTAPCLSDKIIAAHKKRQEKKAKEKAEKRAKQQAAKQKQQEQQQEQQQEQQQEQQQEQQQEQQQEQQQQQQQQQQQQQQQQQQQQQQQQQQQQQQQHQQPAASAHPQSHAAPQSPPPKKPSTHQRSRKVRIYPSRVQRQWLNTYFAAATEAYNAAVDDHNAGAAYDGAYARRDGVRVLMRLNQLAALTDEDLKQAYTQQDEAAQRQQQLKEEFERLLQPPPPPPKKPSTHQPAASAHRQAHAAPKQPPPPPPPKKPSTHQPVASAHRQAHAVPKQPPPPPPPKKPSTHQPVASAHRQAHAVPKQPPPPPKKQSKRPGSSPVSPAVLLLLRLQSQGDDKACSGDCGQDTSPTGSTTACTQHQQQPSKKAKMLPPLQLPQVDGAGDLGDDELDGDHQDDDAPSDDAPGPATKKAKSKPRRCTVCRQSGHDKRSCRQTSQSKPQPQHQKQQQKQTQKQKAPQSGQTQSSPPLPPLPPLPPLPDLAKARASLLQLRKLNDELQAAVRERDEVQEVVDDLLDPVEHDRAARSLKDKQVVADTKHRHFLHALQALKTMLLNELQEFQACRRAAKSRKEALAEEHAAKQEALAEEHAAKQEALAEEHAAKQEALAEEHAAKQEALAEEHAAKQEALAEEHAAKQEALAEEHAAKQEALEKHQQREVADLEQRQVQEIRDCTLTDAYARKIADVHRSTWLMTKKGMAVSSWTGSILEFHTALKTQQQRQEENDTFKFHMNFRGQARFTLDASGRYHICVASNFTRGAPDDVGTLGQSLLQVERPVLAGCDDGLQEVEEEEEARAKCEEHGGGDMAMQALEEKARVRERKMGEVARRLQAEAREARRRWVRLRRAKAIDKQTQEAEAEFQAARERHAAHLDWRRRLRKRRRLLRMKERNALLRERRGGVVSIDPGVRVPFTLWTASGTVSIAHDAIEELRMLLRNADDIRADADLLEVAVQEGEARGEGDVAAARRRHRQQLRVVRNRVDHLHRVVANYLVMSFRVVLLPRFGTSRMIRRSGRPFGRDTARSMGVWAHHRFRQLLLDRAEREPGCTVVICDEAWTSKTCGRCGRLHHSLGADDVFACPHDSCRYVAGRDANAARNILLLWLYRNDIQLAPVPAP

SEQ ID NO: 3135 - protein, 948 aa, Salpingoeca rosetta
MLLFHHLQELTLTRYGVRLSLRDLRLDTLQLAAVLSGCDYLPKHSGAHIHGIGMRTAMYVTHKYKTYTDIMQHLRQKYIITDDLDARVRHAMLAFACQVVWDDTEKARRRLPPLAPEPADDDGDSAHPATTPLFEFTSDPANEGHTVAGVVHVENAVERARGRADPDTGHTCHSVRLRPALKAIVSDMRNGRLETTSHRTRRPGRKPHDRNGRDDCGKSTKQGKRGQKRRGQDQNKNPRVAVLMPFKRLGVELERSKVLEMCRYAGQMKCTATTALYLHILRTAEQHHREILSTLADLAQTTRKEIVERKVAFREAQERAEGVEDLKKKKKKKKDHKKSRAASPSDNPCKRAKGAAATTAATATTPPATATTVTAAATGKSPRPAYCFQHLAPQLTADKLSNLFTTLRNHKKHSQHPMLSILRQHGVGIPDPPKWMTATMAYKLLNLASKEFTPLLQRDLKNKARAAQRQLKKVAEHHDEGARFACEHTAELALYIGAAQHLARTLAPPDTDLTSLKIFPTFTNKHPFIQLDAGLLRDLTCFKCGRLGHSQRQCRQPAAVRPPPRQALSLLDFLGADVARQFRKRRVTSIRTDGYTAYLLVEPSARRDTVCDTSPITPVVGVDPGTRIPLACVRIQDGKKMIVSQKRIVNQLYTGRGRRHHKPTATVPARSGGSDEGGEQGGAMGKGETGSRRKKRERGKRTKRERSRRRKEKARIEKEEQLRRQQQEEQGGRDKGEGQEGRDKGEEEREQREREEQGGGAEPGSVDDVVASARECLREGVSRRELKWRLHEKLKHCRFRSRVAGELATRFGRDCRVFFGDCVHKGRGGGTKAPILELRRAIGCRVDTKIVEEFRTTKYSLCCAWPNRIDEQTRIATCTHCGASADRDVAAAKTIAARSLVEEANGELGPWRGSSEPDRPDMDNGLVTVSRRMCREWSIANHRHHLGL

SEQ ID NO: 3136 - protein, 707 aa, Salpingoeca rosetta
MTSAAVARHLAKARASLLQLRKLNDELQAAVRERDEVQKVVDDLLDPVEHDRAVRSLKDKQVVADTKHRHFLHALQALKTMLLNELQEFQACRRAAKSRKEALAEEHAAKQEALAEEHAAKQEALAEEHAAKQEALAEEHAAKQEALAEEHAAKQEALAEEHAAKQEALAEEHAAKQEALAEEHAAKQEALAEEHAAKQEALEKHQQREVADLEQRQVQEIRDCTLTDAYARKIADVHRSTWLMTKKGMAVSSWTGSILEFHTALKTQQQRQEENDTFKFHMSRQAARNTIPVDAVNLKQTRGMFAVMCVDKLRVAEPLPAAKDFRGQARFTLDASGRYHICVASNFTRGAPDDVGTLGQSLLQVERPVLAGCDDGLQEVEEEEEARAKCEEHGGGDMAMQALEEKARVRERKMGEVARRLQAEAREARRRWVRLRRAKAIDKQTQEAEAEFQAARERHAAHLDWRRRLRKRRRLLRMKERNALLRERRGGVVSIDPGVRVPFTLWTASGTVSIAHDAIEELRMLLRNANDIRADADLLEVAVQEGEARGEGDVAAARRRHRQQLRVVRDRVDHLHRVVANYLVMSFRVVLLPRFGTSRMIRRSGRPFGRDTARSMGVWAHYRFRQLLLDRAEREPGCTVVICDEAWTSKTCGRCGRLHHSLGADDVFACPHDSCRYVAGRDANAARNILLLWLYRNDIQLAPVPAP

SEQ ID NO: 3137 - protein, 485 aa, Salpingoeca rosetta
MLSILRQHGVGIPDPPKWMTATMAYKLLNLASKEFTPLLQRDLKNKARAAQRQLKKVAEHHDEGARFACEHTAELALYIGAAQHLARTLAPPDTDLTSFKIFPTFTNKHPFIQLDAGLLRYLTCCKCGRLGHSQRQCRQPAAVRPQPRQAPSLLDFLGADVARQFRKRRVTSIRTDGYTAYLLVEPSARRDTVCDTSPITPVVGVDPGTRIPLACVRIQDGKKMLVSQKRIANQLYTGRGRRHHKPTATVPARSGGSDEGGEQGGAMGKGETGSRRKKRERGKRTKRERSRRRKEKARIEKEEQLRRQQQEEQGGRDKGEGQEGRDKGEEEREQREREEQGGGAEPGSVDDVVASARECLREGVSRRELKWRLHEKLKHCRFRSRVAGELATRFGRDCRVFFGDCVHKGRGGGTKAPILELRRAIGCRVDTKIVEEFRTTKYSLCCAWPNRIDEQTRIATCTHCGASADRDVAAAKTIAARYGSM

SEQ ID NO: 3138 - protein, 501 aa, Salpingoeca rosetta
MRWAVTEAIRDMYLKCAEEHDILGELQELAQTTRKRYVQAKIDFRKTGKWDKEVKTPTEPATFSSKVVELSAHGMGRVCTRMRQHARNKEARQPDPQGIERFFGDRVPTRPSFMSATAAHTLLNLQFRLMEGNCRLYLRVAARKAAARSSRAGGGCLASVLSKNVRSIRTNGHIAYLIQKKAPATSTATSSSRSTGTSKKAGKTEATDVKPDVCRVVGLDPGTRKPLVAVRLGDGKKYTVSQARLVSECGVKAGRTSARGATSTDGDDGDNDGDDDEGDDVNCDDDDDGAIKDSKVGHGHPEDRGGDDAKGACEDASSGDDGRGPPALSGRRLKRKLHTRMKAIRPYQQRALAAAGANVHRGRGGGAKSSTLRLRRMLEARAPLQTVDEFRTTRYSLCCAWPRDIDASRQSRCKSCGDTRDRDAAAAVTIACRTLTAQAGGNLGVWQRRTCSPQIPDRHNALRRTHRRVQRMWSVRMRAATVANRLLKLNSRLGKTSPHRQ

SEQ ID NO: 3139 - protein, 1658 aa, Cavenderia fasciculata
MKHNKKGLKKEKKQNIDTDERETLWTLADQNSSRNTEMPWQIDEYICIGRLPYNYVLQQGNGSIQTKVNEVFPVGVILAIKEPYFKVTVAGNLAVRIDDHPHPENQMWKDSLFSKLPKDIEGWRTRGNDYYTKGNYECALGCYNSALQLDQQHAIMLLNKLAAILALKRYHECIPLGHVLLSKLPKEPKVYARMQVAMEKEFAGKSLKDVIAIGIDPNTCSITVVNNHDDKVLDMRMDTLMVKRNTKFLLEKISCHMGKAIKSFESCLPSLKFNVLNPQTFQSRLDYYEKYCDYFDIYFEAINDPIVLSWKRNFAFKKQKLNKEFYQQFDNYILDLFKDHFPTKYASMNDSERNQYIQDNTIIFFGNAKFGHNTRGKVTTFAAKTVANKLKSKQYSVVYINEYNTSRLGKEKDGGQPTNVQQCSPISEACQSAAKGNSFLRCSDHRHRLALVKQDTLSKEYKESLGFLKSIDDLDKKLQSHNLLNVAGQCRTRKVTPSDVAGSETESRQDSQKVASTQSSSSSTKKFDYRHGQNKYGPEIRKSIMMSTQRYKVNKRISVSYESSSSTILATTIENDQITSSNNSSCISSTSNTTRTTPLSMSSLLMLPQMSPFILGYALEDMDSLDEIATIPSSTSFPLHPFVDYSSFSFLALYFNQNNNNQNDNNNNIDSSLNLSKSLVNLYNRLQSNNVLDITMEQLVWIIYLVLDYYHKTFAKSTPKMTTPHVDVLSSFIPLHTPYSEMGGDETILNAIQSMSSDEQREESYNDCMKIFTKRYKSLDQLVQWTVKEFIGNDIALPIFKNLFAMTFRVYNLVKVAAMVPISIGPNITFNGFLPIPHHLLHTIVHYSSKTKNNNNNNNNNLQQNLFKVAIENQHNENKNNVEMVASLKRKIYKDSPIYLDSIEIMTLKEYNASILNNGQKIATDSSSFIGGTTDQDEYSFELISNEDLLLFYGYTLDDYDNISFNIDAFKPQSQLMSEYNGDELEREIKLMNAKLKILKEIGVYKQEEKDQDNSSDKQKNQDQSPHNNSFSYLDIKTGNYRDILTRDKQLGINLLEVTRISKLREMESYFYEKGQCHTLICNRNELETLVYLSRHLGTVQRNITTKISIINKAISDTPSYSLSSSNTQGSPSILLTEMEKYYKNHQSIIEHSLQFISTLKTQHCRNACKQVSFVKPTDVVYRKFEKWLTDGGVHFPKLQIANFNDSTGRGVVTTKKVEENECVVSVPRKFLINVDCARKHPVLNSILFEEATGLNDDTILFLFVIYEKENPNSFWRPFFDTLPSYFPTSIHYTTTELLELEGTNLFEETIQIKEHLESIRELLFPELSNQYPDVFPESLFTMENFLWARSLFDSRAIQLKIDGRIVNCLVPMADMINHHDQAQISQRYFDQENDCFRMISCCNIPATSQIFLQYGALQSWELALYYGFVISNNHYDSVHIGFDMPEEDTPELREEKQKLLDRHLLTVDHHYLHRSNIPSKLLASLRVALLAEDEFNPHVDVWNPISRSNEEVVLYTLYSTVLMLLKQFSSTCDEDQQLLEQLMTITKSIKEKKKEQEQGGNEDEEEEEEEEEEEEEDNQTDEESTEQMKIVLQYRIEQKQILVSTLESIITSMKEIGMEIPQSPSSYDQDEDQDDDDYDSFENDSSSSDENDDNNNK

SEQ ID NO: 3140 - protein, 1868 aa, Cavenderia fasciculata
MDAKVSCFNKKIVSFSLLYDWICWKISPLRLFAITVCANEKVVSDVQISMNSRLLPYHLKKRQKLEESFPEQSLVSQKNGQDGTPMDDSDDDDDDDDESWKYLPMVCEQCDATIPILSEHEKRLDLCGDLMDLYSVDIQLKRNAFEKMPPFDSKDDLFPPPVPLIAEINHRLVKFDQPESPHVEIFLHEALNTTSIALNSNRSGIAPSMRNLFNLIKTTSDPSMQFRIRDAYPFVHDSSTGGFENEIKHEIMVKELMNHFSMTTSKLIIVCGQFPCKAAKEAFNANPLDYEMVDYSQESYHTILDKAKGTTEDKEVDVSRIVPKRLIAIAPHPSVMFALHITAAYILIAHDIYKMAPKVSQFDPVQTFKSNSPSSASSSFSSTSLSSTSSSSSASSSSSSASSSSSALSPSSSSSSTSLSSTSSSSSASSSSSSLSSTSSSSSSPSSSNQNTTKRPNLSNKTKDFPKLKQWTLEHLVEEATSRKIDVENIKEDRLQVECVLLKSVLGVQIWSEQKIEQFDLEKSNSKKDILTYAREKNIPLTDYWFFMTLETLKKAVQRCLASTSSPSPSSYLPTPSSPLTDISLPSSPSLTDAPPTSSSSDTSTPPSSTDTSSLTDTSTTSSETETPPSSTDTSSLTYTSLPSHSFSYSSYSKPFVKNEKCVYKDEEKHIRAKRDFYHSGMCRRRRSKWKVMRENNRGNYLYIGIDPGRSKCTIVDSMNRARVVSVASYYNLMGTDRLLARQQNYKKNPVLSKFESGLPTYNTFDTLFNVESVLRRIEYERFTHRDQCRLYSHVVTSYTFQTMDKNRNIDKKRAQYAYAKSFVPPTTIPKNRIVIYIGGSDFFRGSRGGGRTGCTSKTLLRLFLNMGYKARLVNEFNTSKIHNACASKIHSTNNNKFLKKAKHQKVKNVLPESFEKTHVVGAPISSTFSDNGVRWQGKDSKLCDGCKLTDYNCQCSKAQLADKENDSTLKVSQLADDMNETLKVFISLENTSPSPTMLLESLFSLSKKTVKELIEFCNLNSIKYHQQEEPTKGKNKRGSHKDSKGGATNSKKDQLINAIIKFNFEKQKRDASKNKKKRSKSSSTTNDRCKDQDQSNSQKDGNKSTSNSVSTHDYGFGKSLCDSQIKDLWKSMNPNATEMPFKTKWQWLYCPVCDHFFNRDTSAAKNILLLGILHQTADYRPWIYRPLPADIVHIGRKIDLATLQELDLSSQGFTETSSFSRLKALEILDLSTNRFQLIRHIKGLFDLPRIKQLKLKGNPVTKAEAYRLTVIANLPTLQVLDDIVEVKDPLLNPSSSSSSSSTDDSNDILEANVKEPEPPKKVEKPVVVEKKEEKPVVATPKEEPKPTPTPTPTPKPAAPVEKKEEKPVAAVAPKVVEKKEKPIEKEIKKKLVFVDEDTLFDSKPKAQLSFEEEEDKSKLLFGDDDDSDLKALEKKKAPAKKAAEPKKLLFEDDDDGDSLFAPSKSTKAANNSNTKSSDDLDDLFSSFGGGQDKSISKEFDVSSYIESQKNRKKQSLFEMENENIDIIPDSPTLNSNNNNNNSNGIDYSPSSPSSLISGYTKPKHRPKLYPFHFNIHLPNSRNRAKWRYDLGAFIESHRVQVFIVGLIILDLVITIVELFLEETYKCTDHHDIPHAVQTAEDVFQIMTLVLLGLFEIEIIGLLLSFGFDFFKHPLYVLDAIIITVSIVVDVVFRESASNLLVIFRLWRLVRVGHGIAVSVETHDRNKYKHLKRHFKKCKAHYKQVEEENQELRKRLDLSSPSSHFSPSHIPGISNNNTTTTSTTKRQDNNNNHSNTSRNDLSTSPTFSPSTFTSMDSPTVSNHSSGPQSRKIYKQTKTKKNKKSNTSKYPSDDDDDDDDDEISQDEDQ

SEQ ID NO: 3141 - protein, 1221 aa, Cavenderia fasciculata
MDAKVSCFNKKIVSFSLLYDWICWKISPLRLFAITVCANEKVVSDVQISMNCRLLPYHLKKRQKLEESFPEQSLVSQKNGQDGTPMDDSDDDDDDDDESWKYLPMVCEQCDATIPILSEHEKRLDLCGDLMDLYSVDIQLKRNAFEKMPPFDSKDDQFPPPVPLIAEINHRLVKFDQPESPHVEIFLHEALNTTSIALNSNRSGIAPSMRNLFNLIKTTSDPSMQFRIRDAYPFVHDSSTGGFENEIKHEIMVKELMKHFSMTTSKLIIVCGQFPCKAAKEAFNANPLDYEMVDYSQESYHTILDKAKGTTEDKEVDVSRIIPKRLIAIAPHPSVMFALHITAAYILIAHDIYKMAPKVSQFDPVQTFKSNSPSSASSSFSSTSLSSTSSSSSASSSSSSASSSSSALSPSSSSSSTSLSSTSSSSSASSSSSSLSSTSSSSSSPSSSNQNTTKRPNLSNKTKDFPKLKQWTLEHLVEEATSRKIDVENIKEDRLQVECVLLKSVLGVQIWSEQKIEQFDLEKSNSKKDILTYAREKNIPLTDYWFFMTLETLKKAVQRCLASTSSPSPSSYLPTPSSPLTDISLPSSPSLTDAPPTSSSSDTSTPPSSTDTSSLTDTSTTSSDTSTPPSSTDTSSLTYTSLPSHSFSYSSYSKPFVKNEKCVYKDEEKHIRAKRDFYHSGMCRRRRSKWKVMRENNCGNYLYIGIDPGRSKCTIVDSMNRARVVSVASYYNLMGTDRLLARQQNYKKNPVLSKFESELPPYNTFDTLFNVESVLRRIEYERITHRDQCRLYSHVVTSYTFQTMDKNRNIDKKRAQYAYAKSFVPPTTIPKNRIVIYIGGSDFFHGSRGGGRTGCTSKTLLRLFLNMGYKARLVNEFNTSKIHNACASKIHSTNNNKFLEKAKHQKVKNVLPESFEKTHVVGAPISSTFSDNGVRWQGKDSKLCDGCKLTDYNCQCSKAQLADKENDSTLKVSQLADDMNETLKVFISLENTSPSPTMLLESLFSLSKKTVKELIEFCNLNSIKYNQQEEPTKGKNKRGSHKDSKGGATNSKKDQLINAIIKFNFEKQKRDASKNKKKRSKSSSTTNDRCKDQDQSNSQKDGNKSTSNSVSTHDYGFGKSLCDSQIKDLWKSKNPNATEMPFKTKWQWLYCPVCDHFFNRDSSAAKNILLLGILHQTADYRPWIYRPLPADIVHIGRFKSSCSAQSSSSSNAKKGLKFSYS

SEQ ID NO: 3142 - protein, 1744 aa, Cavenderia fasciculata
MATKVQDNPFEKGPLPYPTGDKQDFKNALTKYYDTTGLNKIEKDEMMKDIDKCLSGPLSIGKALIDAVLCKVTQVEERSSSSLPKKYISSKDEEKAKAILEMVSKTFSKLNVQRLTENQKIRNALKDSDLAPIGTCHSYLTEFSNSIETQFLAETVETFKRHLTSLKDYIHDRRIYLLLSYEVCELLQGILDKLNGGGNDIGEAIEAIKLICDSQQLKDHNLRCIAKGKKNLEEREKEQEREKKQARGKKSKKNYDLENEMADFSKINIDGKIITIKELAETALRLDAGIIPTNDGLPQVNERMLSETSKRLKELIDSSVSPKSSWSSLDKDQLNRLKLFNLENVICLDKEKVDLSKLTTKQFESLIDFWKTIGYEFPKESNASNHKEKLENLQTSDFERIRTKEIRIKCLVPQYGFNSTLIPFSLKLFVNILKNSGIDRTITLTSKDKINKYLQTIFPNLENVLGHPLSGGYPLSRYSFFDKEIDHLIDLSKSPSPDLSPPSPSPVVSPPSPSPVVSSRGSSKSNVRILGEKSDTFHNFKGLVWDDLCQQLKARGINFDTDTPKKEEEEDKIALVKLVLWKDMLKNRPELNIVDFDYNRSPNKMEILTWLRDNNIEIKDVAVDKMLIDIQNTSKRGFSPSVDLETPCIPWKKQKNLEEPNEHVPMSEDSTPSTDIISYPLKCTVVETDKAKMSPNHPHFPCYIAQQVGLKPSVTKEIRKITCAHCLVSHTLNSECLPIQCPTPLCNIQIPILSEHEKRKETCGNFSNLYNVDPSLKKAASEKLVHSSDSCPPVKPAISQVDRILREYISTDSPHVEIFLHEPLNTTSIALNSDRSGIAPTMRNLANVINATSDPSMSFRIRDAFTSVRDSSAGGFEDEPKEKEMAEELKKQFESTTSKVIIICGHVACKAAKAAYEVNKKDYEIVDYSQNSYDNICDTFKVKGKRLIAMAHHPSVMLATHLIAAYITIAHSVYELKPKVSMFDKIKTFASTTSAVSSSSEPSSSSSSSGLTTTSSSVGIPLTSTSTGLNNTKKLGLVNGKSLNMFTKFDQAALLEQAKAYDITVQAEEDPYSIKLALWKATLGECEVSTDKSFDPNKSKLELLIWARDNQISIQDDWFTTKLKILVKVLKSYSEKLPTAPSVPAPSVPDSSVPAPSVPDSSVPAPSGSTPTAPSVPDSSFIKNIQDDDGVPLYENRRAKRNFYHPETLFSLESVMKRIEYERVTCQHQCRLYVQVVTSYTFQTMDKNKHIDNQRARYAYAKRFVPPTTIPKNKTVICIGGSDFYRSSRGGGPTGLGPKSFYRLWKNMGYKALMVNEFNTSKIHNACAASIHLTNNEMFKDKIKHQKIENKQLPESLEKTLVVATPPISDNGVHWECNFKKDEKCGKCACKKYDCQCANGDLAKDINSSLETFITLEKGSPSHTLPLESLYSLNQKTKKELIVFCNENKIDYNDKENEEDEDDEDDEEEEEDDEESKENQKKTGKKRKKKKITNIIKKKKKNNNNNNNNNNNNNNNNNNNNNNNNNNNNNNLSGSQSTRDWICHFKLNGNGFFVQSATGSSTEIRVLQKIFSFWEYYTRPKQVIALGYTVPYPLMSYTLAGRIYKEQEEREGQDNSIVYTIMGKLFMSYYSGGSIYCCNGCHVHLTLHEQLISKAFQGRYGAAYLFNECKTYDIDLPFSINVVVGESEDRNLTTGMHVVADIYCVQCNQLLGWKYEFAKEDSQKYKVGKFILEKEKIVKISDFD

SEQ ID NO: 3143 - protein, 1194 aa, Cavenderia fasciculata
MDAKVSCFNKKIVSFSLLYDWICWKISPLRLFAITVCANEKVVSDVQISMNSRLLPYHLKKRQKLEESFPEQSLVSQKNGQDGTPMDDSDDDDDDDDESWKYLPMVCEQCDATIPILSEHEKRLDLCGDLMDLYSVDIQLKRNAFEKMPPFDSKDDLFPPPVPLIAEINHRLVKFDQPESPHVEIFLHEALNTTSIALNSNRSGIAPSMRNLFNLIKTTSDPSMQFRIRDAYPFVHDSSTGGFENEIKHEIMVKELMKHFSMTTSKLIIVCGQFPCKAAKEAFNANPLDYEMVDYSQESYHTILDKAKGTTEDKEVDVSRINPKRLIAIAPHPSVMFALHITAAYILIAHDIYKMAPKVSQFDPVQTFKSNSPSSASSSFSSTSLSSTSSSSSASSSSSSLPPSSSSSSTSLSSTSSSSSASSSSSSLSSTSSSSSSSSSSNQKTTKRPNLSNKTKDFPSLKQWTLEHLVEEATSRKIDVENIKEDRLQVECVLLKSVLGFQIWSEQKIEQFDLEESKSKKDILAYAREKKIPLTDYWFFMTLETLKKAVQRCLASTSSPSPSSYLPTSSSPLTDISLPSSPSLTDAPPTSSSSDTSTPPSSTDTSSLTDTSTTPSSSDTPPSSTDTSSLTYTSLPSHSFSYSSYSKPFVKNEKCVYKDEEKHIRAKRDFYHSGMCRRRRSKWKVMRENNRGNYLYIGIDPGRSKCTIVDSMNRARVVSVASYYNLMGTDRLLARQQNYKKTPVLSKFESGLPTYNTFDTLFNVESVLRRIEYERITHRDQCRLYSQVVTSYTFQTMDKNRNIDKKRAQYAYAKSFVPPTTIPKNRIVIYIGGSDFFRGSRGGGRTGCTSKTLLRLFLNMGYKARLVNEFNTSKIHNACASKIHSTNNNKFLEKAKHQKVKNVLPESFEKTHVVGAPISSTFSDNGVRWQGKDSKLCDGCKLTDYNCQCSKAQLADKENDSTLKVSQLADDMNETLKVFISLENTSPSPTMLLESLFSLSKKTVKELIEFCNLNSIKYYQQEEPTKGKNKRGSHKDSKGGATNSKKDQLINAIIKFNFEKQKRDASKNKKKRSKSSSTTNDRCKDQDQSNSQKDGNKSTSNSVSTHDYGFGKSLCDSQIKDLWKSKNPNATEMPFKTKWQWLYCPVCDHFFNRDSSAAKNILLLGILHQTADYRPWIYRPLPADIVHIGRVDTT

SEQ ID NO: 3144 - protein, 1580 aa, Cavenderia fasciculata
MDAKVSCFNKKIVSFSLLYDWICWKISPLRLFAITVCANEKVVSDVQISMNSRLLPYHLKKRQKLEESFPEQSLVSQKNGQDGTPMDDSDDDDDDDDESWKYLPMVCEQCDATIPILSEHEKRLDLCGDLMDLYSVDIQLKRNAFEKMPPFDSKDDQFPPPVPLIAEINHRLVKFDQPESPHVEIFLHEALNTTSIALNSNRSGIAPSMRNLFNLIKTTSDPSMQFRIRDAYPFVHDSSTGGFENEIKHEIMVKELMNHFSMTTSKLIIVCGQFPCKAAKEAFNANPLDYEMVDYSQESYHTILDKAKGTTEDKEVDVSRIVPKRLIAIAPHPSVMFALHITAAYILIAHDIYKMAPKVSQFDPVQTFKSNSPSSASSSFSSTSLSSTSSSSSASSSSSALPPSSSSSSTSLSSTSSSSSASSSSSSLSSTSSSSSSSSSSNQKTTKRPNLSNKTKDFPSLKQWTLEHLVEEATSRKIDVENIKEDRLQVECVLLKSVLGFQIWSEQKIEQFDLEESKSKKDILAYAREKKIPLTDYWFFMTLETLKKAVQRCLASTSSPSPSSYLPTPSSPLTDISLPSSPSLTDAPPTSSSSDTSTPPSSTDTSSLTDTSTTSSDTSTPPSSTDTSSLTYTSLPSHSFSYSSYSKPFVKNEKCVYKDEEKHIRAKRDFYHSGMCRRRRSKWKVMRENNRGNYLYIGIDPGRSKCTIVDSMNRARVVSVASYYNLMGTDRLLARQQNYKKNPVLSKFESGLPTYNTFDTLFNVESVLRRIEYERITHRDQCRLYSHVVTSYTFQTMDKNRNIDKKRAQYAYAKSFVPPTTIPKNRIVIYIGGSDFFRGSRGGGRTGCTSKTLLRLFLNMGYKARLVNEFNTSKIHNACASKIHSTNNNKFLEKAKHQKVKNVLPESFEKTHVVGAPISSTFSDNGVRWQGKDSKLCDGCKLTDYNCQCSKAQLADKENDSTLKVSQLADDMNETLKVFISLENTSPSPTMLLESLFSLSKKTVKELIEFCNLNSIKYNQQEEPTKGKNKRGSHKDSKGGATNSKKDQLINAIIKFNFEKQKRDASKNKKKRSKSSSTTNDRCKDQDQSNSQKDGNKSTSNSVSTHDYGFERKKEITYASQYIYSYQITRYDPNPLVQFVYLEGGTFSISINAKPQNHPLFFLLCSDDDWKNIFGYKIPEPTCNLLENPEMLKICDVGVNFTDTLSVYKVITKYNKYLVNILDCQDSVVQEKPVNITLDLKMINPDNNNLSAELIPAPFMYTIMGILWCIVLLFWLYNNIKHVQRISKIHFFMTLYPLLKLVICFYNASLIRDLSHLDTSPTQIFFRKFLDIFFNLYIQVLLLLLGTGWYVTQNTIKGDRYNMMALVGGLSVAMILDELYVSDSISYLFVELFILSIRVFLLFYVFIAININSRQLEYHILQYNPSQESQTTLSQEEIVLFIKKFKLFVMFKLILLFWVALITLKFFTSLLLYGGIINNWVSMMNSENIDLILFICIGYNYRARSENIFKIIRIRPPELDSRVNREHMHHNLVRNQQQNQNNNNNQSDEDDNNNDNYDDDEDHGIEMRDLSNNNNRHNNI

SEQ ID NO: 3145 - protein, 1075 aa, Cavenderia fasciculata
MKYSTIVSNETQKKKKKKKKSNSSSSSYWTFKSMDITDDQSSSSSSSSSSSSSSSTTSNNMDTTDDQSTTTTTTTTTISPVPTNDELIQSIRKLANFIGNQTTTFLNLIATNNKCFESNGTPVPFVVKFFQTQCKLTENQLKENLTTFRFDRTSIEWMIRYFALGGDAIFSAMGKHPVPRIDTVEDLSNDSIYSLCFFMKHVAPFLEKEMQKRPKMLQMLQKLRQFRCNNSKNWVNVIVINIKNNIMVSTYNHLKQLLNTYKDRKIKDLGKNQEEIKKVKKLVRDTIYNFSNTRLKRAEKDQQPVQEEGEEDEEGEEDEEGEEEEDEEKKADRVVTYDLSDGVYKTIEILGGYNQQVIDEYNNLSDDKKKKKEAKYDNRVSRRKNIIKKKKEDAHKRREAIIKERREASIKLQKSPNTSLTVDDLTNSPSSSPNTSSPRNPKGKFNQRMKHDSIRIRELDELKKITIEAEKRNADLQQISDTRTPTVFIPGLINISSIIPSLGFDIQFMFTREHAKNLLKCLGLKKANVEKDHEGNPSYAIATLFPGLYKYDPRLFTNTKRVYLPATPPTDVEKQKDEERRKTNNDNRFASALKKYKGNEDVARVAATLQTGEKAKNAIEQHNKLHGFKKGSHDKNRALLAKGTITFSKEEMFQEIVNKGVKYENTSTTTTPSTSSSSSSLPYVTQVAMEKEFAGKSLKDVIAIGIDPNTCSITVVNNHDDKVLDMRMDTLMVKRNTKFLLEKISCHMGKAIKSFESCLPSLKFNVLNPQTFQSRLDYYEKYCDYFDIYFEAINDPIVLSWKRNFAFKKQKLNKEFYQQFDNYILDLFKDHFPTKYSSMNDSERNQYIQDNTIIFFGNAKFGHNTRGKVTTFAAKTVANKLKSKQYSVVYINEYNTSRLGKEKDGGQPTNVQQCSPISEACQSAAKGNSFLRCSDHRHRLALVKQDTHSKEYKESLGFLKSIDDLDKKLQSHNLLNVAGQCRTRKVTPSDVAGSETESRQDSQKVASTQSSSSSTKKFDYRHGQNKYGPEIRKFGKMVTVRQDMERQINCQGKNRGINTIWALKVVFEYMHTTTT

SEQ ID NO: 3146 - protein, 1198 aa, Cavenderia fasciculata
MDAKVSCFNKKIVSFSLLYDWICWKISPLRLFAITLCANEKVVSDVQISMNCRLLPYHLKKRQKLEESFPEQSLVSQKNGQDGTPMDDSDDDDDESWKYLPMVCEQCDATIPILSEHEKRLDLCGDLMDLYSVDIQLKRNAFEKMPPFDSKDDQFPPPVPLIAEINHRLVKFDQPESPHVEIFLHEALNTTSIALNSNRSGIAPSMRNLFNLIKTTSDPSMQFRIRDAYPFVHDSSTGGFENEIKHEIMVKELMNHFSMTTSKLIIVCGQFPCKAAKEAFNANPLDYEMVDYSQESYHTILDKAKGTTEDKEVDVSRIVPKRLIAIAPHPSVMFALHITAAYILIAHDIYKMAPKVSQFDPVQTFKSNSPSSASSSFSSTSLSSTSSSSSASSSSSSASSSSSALSPSSSSSSTSLSSTSSSSSASSSSSSLSSTSSSSSSPSSSNQNTTKRPNLSNKTKDFPKLKQWTLEHLVEEATSRKIDVENIKEDRLQVECVLLKSVLGVQIWSEQKIEQFDLEKSNSKKDILTYAREKNIPLTDYWFFMTLETLKKAVQRCLASTSSPSPSSYLPTPSSPLTDISLPSSPSLTDAPPTSSSSDTSTPPSSTDTSSLTDTSTTSSDTSTPPSSTDTSSLTYTSLPSHSFSYSSYSKPFVKNEKCVYKDEEKHIRAKRDFYHSGMCRRRRSKWKVMRENNRGNYLYIGIDPGRSKCTIVDSMNRARVVSVASYYNLMGTDRLLARQQNYKKNPVLSKFESGLPTYNTFDTLFNVESVLRRIEYERITHRDQCRLYSHVVTSYTFQTMDKNRNIDKKRAQYAYAKSFVPPTTIPKNRIVIYIGGSDFFRGSRGGGRTGCTSKTLLRLFLNMGYKARLVNEFNTSKIHNACASKIHSTNNNKFLEKAKHQKVKNVLPESFEKTHVVGAPISSTFSDNGVRWQGKDSKLCDGCKLTDYNCQCSKAQLADKENDSTLKVSQLADDMNETLKVFISLENTSPSPTMLLESLFSLSKKTVKELIEFCNLNSIKYYQQEEPTKGKNKRGSHKDSKGGATNSKKDQLINAIIKFNFEKQKRDASKNKKKRSKSSSTTNDRCKDQDQSNSQKDGNKSTSNSVSTHDYGFGKSLCDSQIKDLWKSKNPNATEMPFKTKWQWLYCPVCDHFFNRDSSAAKNILLLGILHQTADYRPWIYRPLPADIVHIGRVDTT

SEQ ID NO: 3147 - protein, 1607 aa, Cavenderia fasciculata
MATKVQDNPFEKGPLPYPTGDKQDFKNALTKYYDTTGLNKIEKDEMMKDIDKCLSGPLSIGKALIDAVLCKVTQVEERSSSSLPKKYISSKDEEKAKAILEMVSKTFSKLNVQRLTENQKIRNALKDSDLAPIGTCHSYLTEFSNSIETQFLAETVETFKRHLTSLKDYIHDRRIYLLLSYEVCELLQGILDKLNGGGNDIGEAIEAIKLICDSQQLKDHNLRCIAKGKKNLEEREKEQEREKKQARGKKSKKNYDLENEMADFSKINIDGKIITIKELAETALRLDAGIIPTNDGLPQVNERMLSETSKRLKELIDSSVSPKSSWSSLDKDQLNRLKLFNLENVICLDKEKVDLSKLTTKQFESLIDFWKTIGYEFPKESNASNHKEKLENLQTSDFERIRTKEIRIKCLVPQYGFNSTLIPFSLQLFVNILKNSGIDRTITLTSKDKINKYLQTIFPNLENVLGHPLSGGYPLSRYSFFDKEIDHLIDLSKSPSPDLSPPSPSPVVSPPSPSPVVSSRGSSKSNVRILGEKSDTFHNFKGLVWDDLCQQLKARGINFDTDTPKKEEEEDKIALVKLVLWKDMLKNRPELNIVDFDYNRSPNKMEILTWLRDNNIEIKDVAVDKMLIDIQNTSKRGFSPSVDLETPCIPWKKQKNLEEPNEHVPMSEDSTPSTDIISYPLKCTVVETDKAKMSPNHPHFPCYIAQQVGLKPSVTKEIRKITCAHCLVSHTLNSECLPIQCPTPLCNIQIPILSEHEKRKETCGNFSNLYNVDPSLKKAASEKLVHSSDSCPPVKPAISQVDRILREYISTDSPHVEIFLHEPLNTTSIALNSDRSGIAPTMRNLANVINATSDPSMSFRIRDAFTSVRDSSAGGFEDEPKEKEMAEELKKQFESTTSKVIIICGHVACKAAKAAYEVNKKDYEIVDYSQNSYDNICDTFKVKGKRLIAMAHHPSVMLATHLIAAYITIAHSVYELKPKVSMFDKIKTFASTTSAVSSSSEPSSSSSSSGLTTTSSSVGIPLTSTSTGLNNTKKLGLVNGKSLNMFTKFDQAALLEQAKAYDITVQAEEDPYSIKLALWKATLGECEVSTDKSFDPNKSKLELLIWARDNQISIQDDWFTTKLKILVKVLKSYSEKLPTAPSVPAPSVPDSSVPAPSVPDSSVPAPSGSTPTAPSVPDSSFIKNIQDDDGVPLYENRRAKRNFYHPETLFSLESVMKRIEYERVTCQHQCRLYVQVVTSYTFQTMDKNKHIDNQRARYAYAKRFVPPTTIPKNKTVICIGGSDFYRSSRGGGPTGLGPKSFYRLWKNMGYKALMVNEFNTSKIHNACAASIHLTNNEMFKDKIKHQKIENKQLPESLEKTLVVATPPISDNGVHWECNFKKDEKCGKCACKKYDCQCANGDLAKDINSSLETFITLEKGSPSHTLPLESLYSLNQKTKKELIVFCNENKIDYNDKENEEDEDDEDDEEEEEDDEESKENQKKTGKKRKKKKITNIIKKKKKNNNNNNNNNNNNNNNNNNNNNNNNNNNNNNNLSGSQSTRDWICHFKLNGNGFFVQSATGSSTEIRVLQKIFSFWEYYTRPKQVIALGYTVPYPLMSYTLAGRGYPV

SEQ ID NO: 3148 - protein, 1232 aa, Cavenderia fasciculata
MDAKVSCFNKKIVSFSLLYDWICWKISPLRLFAITVCANEKVVSDVQISMNCRLLPYHLKKRQKLEESFPEQSLVSQKNGQDGTPMDDSDDDDDESWKYLPMVCEQCDATIPILSEHEKRLDLCGDLMDLYSVDIQLKRNAFEKMPPFDSKDDQFPPPVPLIAEINHRLVKFDQPESPHVEIFLHEALNTTSIALNSNRSGIAPSMRNLFNLIKTTSDPSMQFRIRDAYPFVHDSSTGGFENEIKHEIMVKELMKHFSMTTSKLIIVCGQFPCKAAKEAFNANPLDYEMVDYSQESYHTILDKAKGTTEDKEVDVSRIIPKRLIAIAPHPSVMFALHITAAYILIAHDIYKMAPKVSQFDPVQTFKSNSPSSASSSFSSTSLSSTSSSSSASSSSSSASSSSSALSPSSSSSSTSLSSTSSSSSASSSSSSLSSTSSSSSSPSSSNQNTTKRPNLSNKTKDFPKLKQWTLEHLVEEATSRKIDVENIKEDRLQVECVLLKSVLGVQIWSEQKIEQFDLEKSNSKKDILTYAREKNIPLTDYWFFMTLETLKKAVQRCLASTSSPSPSYLPTPSSPLTDISLPSSPSLTDAPPTSSSSDTSTPPSSTDTSSLTDTSTTSSDTSTPPSSTDTSSLTYTSLPSHSFSYSSYSKPFVKNEKCVYKDEEKHIRAKRDFYHSGMCRRRRSKWKVMRENNCGNYLYIGIDPGRSKCTIVDSMNRARVVSVASYYNLMGTDRLLARQQNYKKNPVLSKFESELPPYNTFDTLFNVESVLRRIEYERITHRDQCRLYSHVVTSYTFQTMDKNRNIDKKRAQYAYAKSFVPPTTIPKNRIVIYIGGSDFFRGSRGGGRTGCTSKTLLRLFLNMGYKARLVNEFNTSKIHNACASKIHSTNNNKFLEKAKHQKVKNVLPESFEKTHVVGAPISSTFSDNGVRWQGKDSKLCDGCKLTDYNCQCSKAQLADKENDSTLKVSQLADDMNETLKVFISLENTSPSPTMLLESLFSLSKKTVKELIEFCNLNSIKYNQQEEPTKGKNKRGSHKDSKGGATNSKKDQLINAIIKFNFEKQKRDASKNKKKRSKSSSTTNDRCKDQDQSNSQKDGNKSTSNSVSTHDYGFGKSLCDSQIKDLWKSMNPNATEMPFKTKWQWLYCPVCDHFFNRDTSAAKNILLLGILHQTADYRPWIYRPLPADIVHIGRIGRYIDIMNINPLVLRIHYHVLGHCETKSVIPPILSFIF

SEQ ID NO: 3149 - protein, 1111 aa, Cavenderia fasciculata
MDAKVSCFNKKIVSFSLLYDWICWKISPLRLFAITVCANEKVVSDVQISMNCRLLPYHLKKRQKLEESFPEQSLVSQKNGQDGTPMDDSDDDDYESWKYLPMVCEQCDTTIPILSEHEKRLDLCGDLMDLYSVDIQLKRNAFEKMPPFDSKDDQFPPPVPLIAEINHRLVKFDQPESPHVEIFLHEALNTTSIALNSNRSGIAPSMRNLFNLIKTTSDPSMQFRIRDAYPFVHDSSTGGFENEIKHEIMVKELMNHFSMTTSKLIIVCGQFPCKAAKEAFNANPLDYEMVDYSQESYHTILDKAKGTTEDKEVDVSRIVPKRLIAIAPHPSVMFALHITAAYILIAHDIYKMAPKVSQFDPVQTFKSNSPSSASSSFSSTSLSSTSSSSSASSSSSALPPSSSSSSTSLSSTSSSSSASSSSSSLSSTSSSSSSSSSSNQKTTKRPNLSNKTKDFPSLKQWTLEHLVEEATSRKIDVENIKEDRLQVECVLLKSVLGFQIWSEQKIEQFDLEESKSKKDILAYAREKKIPLTDYWFFMTLETLKKAVQRCLASTSSPSPSSYLPTSSSPLTDISLPSSPSLTDAPPTSSSSDTSTPPSSTDTSSLTDTSTTPSSSDTPPSSTDTSSLTYTSLPSHSFSYSSYSKPFVKNEKCVYKDEEKHIRAKRDFYHSGMCRRRRSKWKVMRENNRGNYLYIGIDPGRSKCTIVDSMNRARVVSVASYYNLMGTDRLLARQQNYKKNPVLSKFESGLPTYNTFDTLFNVESVLRRIEYERITHRDQCRLYSHVVTSYTFQTMDKNRNIDKKRAQYAYAKSFVPPTTIPKNRIVIYIGGSDFFRGSRGGGRTGCTSKTLLRLFLNMGYKARLVNEFNTSKIHNACASKIHSTNNNKFLEKAKHQKVKNVLPESFEKTHVVGAPISSTFSDNGVRWQGKDSKLCDGCKLTDYNCQCSKAQLADKENDSTLKVSQLADDMNETLKVFISLENTSPSPTMLLESLFSLSKKTVKELIEFCNLNSIKYYQQEEPTKGKNKRGSHKDSKGGATNSKKDQLINAIIKFNFEKQKRDASKNKKKRSKSSSTTNDRCKDLDQSNSQKDGNKSTSNSVSTHDYGFVILL

SEQ ID NO: 3150 - protein, 1198 aa, Cavenderia fasciculata
MDAKVSCFNKKIVSFSLLYDWICWKISPLRLFAITVCANEKVVSDVQISMNCRLLPYHLKKRQKLEESFPEQSLVSQKNGQDGTPMDDSDDDDDESWKYLPMVCEQCDATIPILSEHEKRLDLCGDLMDLYSVDIQLKRNAFEKMPPFDSKDDQFPPPVPLIAEINHRLVKFDQPESPHVEIFLHEALNTTSIALNSNRSGIAPSMRNLFNLIKTTSDPSMQFRIRDAYPFVHDSSTGGFENEIKHEIMVKELMNHFSMTTSKLIIVCGQFPCKAAKEAFNANPLDYEMVDYSQESYHTILDKAKGTTEDKEVDVSRIVPKRLIAIAPHPSVMFALHITAAYILIAHDIYKMAPKVSQFDPVQTFKSNSPSSASSSFSSTSLSSTSSSSSASSSSSSASSSSSALSPSSSSSSTSLSSTSSSSSASSSSSSLSSTSSSSSSPSSSNQNTTKRPNLSNKTKDFPKLKQWTLEHLVEEATSRKIDVENIKEDRLQVECVLLKSVLGVQIWSEQKIEQFDLEKSNSKKDILTYAREKNIPLTDYWFFMTLETLKKAVQRCLASTSSPSPSSYLPTPSSPLTDISLPSSPSLTDAPPTSSSSDTSTPPSSTDTSSLTDTSTTSSDTSTPPSSTDTSSLTYTSLPSHSFSYSSYSKPFVKNEKCVYKDEEKHIRAKRDFYHSGMCRRRRSKWKVMRENNRGNYLYIGIDPGRSKCTIVDSMNRARVVSVASYYNLMGTDRLLARQQNYKKNPVLSKFESGLPTYNTFDTLFNVESVLRRIEYERITHRDQCRLYSHVVTSYTFQTMDKNRNIDKKRAQYAYAKSFVPPTTIPKNRIVIYIGGSDFFRGSRGGGRTGCTSKTLLRLFLNMGYKARLVNEFNTSKIHNACASKIHSTNNNKFLEKAKHQKVKNVLPESFEKTHVVGAPISSTFSDNGVRWQGKDSKLCDGCKLTDYNCQCSKAQLADKENDSTLKVSQLADDMNETLKVFISLENTSPSPTMLLESLFSLSKKTVKELIEFCNLNSIKYYQQEEPTKGKNKRGSHKDSKGGATNSKKDQLINAIIKFNFEKQKRDASKNKKKRSKSSSTTNDRCKDQDQSNSQKDGNKSTSNSVSTHDYGFGKSLCDSQIKDLWKSKNPNATEMPFKTKWQWLYCPVCDHFFNRDSSAAKNILLLGILHQTADYRPWIYRPLPADIVHIGRVDTT

SEQ ID NO: 3151 - protein, 1194 aa, Cavenderia fasciculata
MDAKVSCFNKKIVSFSLLYDWICWKISPLRLFAITVCANEKVVSDVQISMNSRLLPYHLKKRQKLEESFPEQSLVSQKNGQDGTPMDDSDDDDDDDDESWKYLPMVCEQCDATIPILSEHEKRLDLCGDLMDLYSVDIQLKRNAFEKMPPFDSKDDLFPPPVPLIAEINHRLVKFDQPESPHVEIFLHEALNTTSIALNSNRSGIAPSMRNLFNLIKTTSDPSMQFRIRDAYPFVHDSSTGGFENEIKHEIMVKELMNHFSMTTAKLIIVCGQFPCKAAKEAFNANPLDYEMVDYSQESYHTILDKAKGTTEDKEVDVSRIVPKRLIAIAPHPSVMFALHITAAYILIAHDIYKMAPKVSQFDPVQTFKSNSPSSASSSFSSTSLSSTSSSSSASSSSSALPPSSSSSSTSLSSTSSSSSASSSSSSLSSTSSSSSSSSSSNQKTTKRPNLSNKTKDFPSLKQWTLEHLVEEATSRKIDVENIKEDRLQVECVLLKSVLGFQIWSEQKIEQFDLEESKSKKDILAYAREKKIPLTDYWFFMTLETLKKAVQRCLASTSSPSPSSYLPTSSSPLTDISLPSSPSLTDAPPTSSSSDTSTPPSSTDTSSLTDTSTTPSSSDTPPSSTDTSSLTYTSLPSHSFSYSSYSKPFVKNEKCVYKDEEKHIRAKRDFYHSGMCRRRRSKWKVMRENNRGNYLYIGIDPGRSKCTIVDSMNRARVVSVASYYNLMGTDRLLARQQNYKKNPVLSKFESGLPTYNTFDTLFNVESVLRRIEYERITHRDQCRLYSHVVTSYTFQTMDKNRNIDKKRAQYAYAKSFVPPTTIPKNRIVIYIGGSDFFRGSRGGGRTGCTSKTLLRLFLNMGYKARLVNEFNTSKIHNACASKIHSTNNNKFLEKAKHQKVKNVLPESFEKTHVVGAPISSTFSDNGVRWQGKDSKLCDGCKLTDYNCQCSKAQLADKENDSTLKVSQLADDMNETLKVFISLENTSPSPTMLLESLFSLSKKTVKELIEFCNLNSIKYNQQEEPTKGKNKRGSHKDSKGGATNSKKDQLINAIIKFNFEKQKRDASKNKKKRSKSSSTTNDRCKDQDQSNSQKDGNKSTSNSVSTHDYGFGKSLCDSQIKDLWKSMNPNATEMPFKTKWQWLYCPVCDHFFNRDTSAAKNILLLGILHQTADYRPWIYRPLPADIVHIGRVDTT

SEQ ID NO: 3152 - protein, 498 aa, Saccharomyces delbrueckii
MNLPIPLVQNTHPLLKQTRISNDHLESKSSTSRPFWNKDAAHHSKQWGLNTILPMAAKKLSQKINFDSWFSVVKHPQAPIINNSLNLPLSSGVKEEMIRARKTRIYPTNSQRETLKKWFGCQRYIYNRALKLHRDGMAMTMKGLRQTLLNKDTNILERQEQWLNDYNYDLKDEALRDLVKNFSSNMVKFKKTGVPFKLKFKTKKAPVQTISVLKKHWNKGAKSFYGPIFSPSKICGAESLPEELPADSRLQRTRNNKYYLIVPMVGEEIARKSHAEKFIFIDPGVRTFLTGYDSNQTVVEIGKDAVVRIEKLKRRRPQLQSKLAKLRKHKKRQNHRKALHRLDGKISHIVQDMHKKSALFLCQYYNNIFLPKLDYHECTKLTRKSRSNMATLAHCSFHDRLTMKAEQLHGASVHEVEEDYTSKTCSSCGNLKDGLGSVKVYSFLKCSSVFDRDFNAAKNIMLKYICEHLMASGESSISSALSTENGRLAMMVPGPFVR

SEQ ID NO: 3153 - protein, 495 aa, Saccharomyces delbrueckii
MTISTQNQAKKRKTSKSKAAKPYWNENAAHFSQQWGLNTMLPTAAKKLGQKINSDSWFSVIKHPQAPIINDSLNLPLSSGVEEELIRARKIRIYPTNSQKETLKKWFGCHRYIYNKALKMHKDGVLMNIKILREKLLNKKTSALTPEEQWLSEYNYDLKDEALRDLVKNYSSNMAKFKKTRVPFKLRFKTKKAPVQTLSVLKKYWNKGKKTFYSDIYSSFSLRGAEPLPEELPRDSRLQRTRNNKYYLIVPMAGGEIARKPPTEKFIFIDPGVRTFLTGYDSSQTVVEIGKDAIVRIEKLKRRRRQLQSKLAKLRKHKKRQNHRKALHRLDEKISHIVQDLHKKSALFLCKSYDSIFLPKLNFHHCTKLNRKSRSSMATLAHCSFHDRLTMKAEQFHDASVHEVEEDYTSKTCSTCGKIKNDLRSNKIYSCLGCFSVFDRDFNAAKNIMLKYICEHLMASGGSSISSSLSGGNGRLAMMGPGPFVRKYVVSPSEI

SEQ ID NO: 3154 - protein, 294 aa, Saccharomyces delbrueckii
MAKYKSTGVPFKLKFKTRKARTQNLSVLKRFWNNKRSFYCDVFSSSKMRSAERLPEQLIMDSRLQRTRHNKNYPIVPIVGEEITRKEGREKFIFIDPGVRTFLTGYDSGQNVVEIGKNAVVRIEKLKHRRRKLQSKLAKLKRQKKRQNHRKALHRLDEKISRIVKDMHKKSALFLCNSYDNVFIPKLNFHHCTKLNRKSRSSMATLAHCSFNERVAMKAEQFRSTSAVVVEEDYTSKTCSKCGNVKQDLGSSKIYSCVQCFSVFDRDFNAAKNIMLTYCSEHLMASGASSILLL

SEQ ID NO: 3155 - protein, 203 aa, Saccharomyces delbrueckii
MVGEEITRDEGREKFIFIDPGIRTFLTGYNSGQNVVEIGKNAFVRIEKLKHRRHKLQSKLDKLRTHKKRQNHRKALHRLDEKISRIVSDMHKKSALFLCKSYENIFMPKLNFHQCTRLNQKSRSSMTTIAHCSFNDRLVMKAEQLRVTSAIVVEEDYTSKTCSKCGNIKQDLGPNKIYSCVKCSSVFDKDFNAATCSSIAVSI

SEQ ID NO: 3156 - protein, 486 aa, Saccharomyces delbrueckii
MTTCTQYQAKKRKRSNSKTTKPYWNEDAAHISQQWGLNTILPTAAKNLSQKITSDSWFSVVKHPQVPVINDSLNLPLSSGVKEENTRARKIKVYPTNSQRETLKKWFRCQRYIYNRALKLHRDGMAMTIKGLRQTLLNRDTIILEPQEQWLNDYSYDLKDEALCDLVKNYSYNMAKYKQTGMPLKLRFKSKKTPIQTLSVLEKHWNKRTKSFWSEVFSLSNFRGTEPLPEELPGDSRVQRTRNNKFYLVVPLAGEEIARKSPAEKFIFIDPRVRTFLTGYDSKQTVVEMGKDAVVRIEKLKRRRRQFQSKLAKLRKHKKRQNHRKALHRLDEKIQHIVRDMHKKTASYLCKNYENIFLPKLNYHQCTRLTRKTRSSMATIAHCCFHDRLTMKAEQFHSTSVHEVEEDYTSKTCSSCGNLKDDLGSNKIYSCSSCSSVFDRDFNAAKNIMLKYICEHLMASGGSSITSASSGGNGGFAMMGPGPFVR

SEQ ID NO: 3157 - protein, 486 aa, Saccharomyces delbrueckii
MTIVVQNQAKKRKTSNSKTTKPYWNEDAAHISQQWGLNTILPTAAKNLSQKITSDSWFNVVKHPQVPVINDSLNLPLSNGVKEEITRARKIRIYPTNSQKETLKKWFGCQRYIYNRALKLHRDGMAMTIKGLRQTLLNRDTNILEPQEQWLNDYSYDLKDEALRDLVKNYSSNMAKLKNTGVPFKLRFKSKKAPAQTLSVLKKHWNKRTKSFWSKVFSSSKMRSAEVLPEKLLMDSRLQRTRNNKFYLILPVVGEEIVRKMKADKFIFIDPGIRTFLTGYDSGQNVVEIGKNAVVRIEKLKRRRRQLQSKLAKLRKHKKRQNHRKALHRLDEKIQHIVRDMHKKTASYLCKNYENIFLPKLNYHQCTRLTRKTRSSMATIAHCCFHDRLTMKAEQFHSTSVHEVEEDYTSKTCSSCGNLKDDLGSNKIYSCSSCSSVFDRDFNAAKNIMLKYICEHLMASGGSSISSALSVRNVGFAMMGPGPFVH

SEQ ID NO: 3158 - protein, 485 aa, Saccharomyces delbrueckii
MTISSQNQAKKRKTSKKTTSRPFWNEKTAHHSKQWSLYTISPMSARKLSQKINSDSWFSVVKHPQAPITNHSLNLPLSSGVKEEITRARKIRIYPTNSQKETLKKWFGCHRYIYNKALKMHKDGVLMNIKILREKLLNKKTSVLKPEEQWLTEYHYDLKDEALRDLVKNYSSNMARFKKMGVPFKLKFKTKSAPVQTLSVLKKHWNKGKKTFYSNIDPSSSMRAAEPLPEEFPRDSRLQRTGRNKYYLIVPTAGEEIVRKSPAEKFKFIDPGVRTFLTGYDSNQTVVEIGKDVVVRIEKLKRRRPQLQSKLAKLRKHKKRQNHRKTLHRLDGKISHIVQNMHKKSALFLCKSYDSIFLPKLDYQCTKLTRKSRSSMVTLAHCCFHDRLTMKAEQIHGANVHEVKEDYTSKTCSSCGNLKDDLSSAKVYSCMKCASVFDRDFNAEKNIMLKYICEPLIASGKSSISSALSVGNGGFAMMGPGTFVR

SEQ ID NO: 3159 - protein, 447 aa, Phytophthora parasitica
MKTNSENAVKLNFYRRLHKQIKRSYYIDGSEAYLMLKSILDPVYDGDDVEILAWRARIPRKSNGYLDDKPHLLLPLTFMFRSDIEEWNHRNRETQGYEEIRHFSLLPTKKGFECSHFTMCNLGLRALLKRAGIAVPNEDVWIAEADSWWRKLFKIEKFETVNRKFSGVIETDGKAVCIVLRKPKREIVETALDEKDYDVLWGLDPGRRDLFVATNQFGEKIFCTTREFYEDAHYKKSNQKTKVWQENRPDVLEAVRNMPTKKTASLEQLEAYVKFMTPRIDLLLDFRMHKPFRKLRFRRYILAKKKLRQLCQRLTAQAGRRTIVGFGDWSNTDVSGLIKKCPAGPVNSFRRELKKHCRVESIDEFRTSKLHSVCHREMKNQYSKRLCKKDGVERTLKVHSVLHCTNNGCHGMTVNRDENASKNMLMLLIECKLRSQPRPLAFSRPRT

SEQ ID NO: 3160 - protein, 599 aa, Phytophthora parasitica
MSRKRKRDDYPGDWDVVEETQDPDKWLPPIEIVAETQDPDGDEEMKGTDSDKEMKEVVPKATRTKTAGTLRKKENKKSKVLRSVVCRVNRICADNRLVKEIKCTTLAMKQIQMETWHLVNLHTLRCLEHDLPLPDYGKTFFDHCCTGVASTQLKQALREQLVVNVDVMIREQFRKRWRAYVLIKFGKTGDGLSPVEEKASKSSSGRSCMLATTNIKNNGLAFYIRPEWEFQSVVEARMEAVLNEKGTLAGFVSRICKCGEGNLMEDWNMPQVKISRSSFGAIRWTVMRRAFAIDHFETVADESVTKPEFRQMTVEAKYNHASHRFANEINTDGYNRQSFIGLDPGMRSVCTAARQHLRPQAPRRRKQRRALRLGQRPGREIVSVTTREYRHLAGFNRFRAWNESQKMKFPEYNKVIDGMPSFKTASYEQYLEPLEYFWQHAAYLLQFCKDRPYLKWRFFQKRMARVAVDTLARRIVPTVSRLTCVAYGDWSRRDGIKGHAPIPVKGLKEALQKRATCPTPVFPKSVDNPKRKKVKGKVLPRDWFQTEIQSRHCHVVLLCENKICQAMYWDRDVNAAINMLELLKSEVQGRGRMQPFKRS

SEQ ID NO: 3161 - protein, 506 aa, Phytophthora parasitica
MQQIQMEAWYLVNLHTLQCLEDDSPLPDYTGKAFYDHCCSCIATTAKTNLNTRKNPELWESYSVYKGKRALTGLEEVRNLVGYSQLKAELREQMIVKAEVMIRQHFAKHLRLYVQIAFGGLGSNLDKKVIKEKALLVREIMRVLHAEWSEQWTPWPNRIGENGLTFYVRLVWEFQSVVEKRMKAEPNEKGVRAFSLFPVSTTYTASHSKINGTTLPGFYLRIKKREKAFYWQIAEVEVSTESFQQNRWVVMCNAFDISRFETRSSQCPLPKSEFASLPVEGKYEHASHLFANQVTTDGYSASILLFRPKTEKNGKDRAEKRPSEHLVIPAGYVPDIVVGLDSGISRRGKKALGSQRKKSDCPHLIRTPKAPQRQCDRDIVRISTREYRHLAGFNKFREWNECLKKRDQEYQRVIVDVPSFKTASFKKYLECLDYFWRHANFLLEFCSEHSFLKWKFFRRRMACVAVDAIAKRIIPVVSTKTCVAYGDWSKRNGIKGHAYSPVKVLM

SEQ ID NO: 3162 - protein, 427 aa, Phytophthora parasitica
MNREQFRKRLRAYVLIKFGKSGDDLSPAEEKVTKKLVGQIMYACYNVEETGCLEALQMRDVLTPDGEDIIKNNGLAFYIRQIWEFQRVVDARMEAVLNEKEVRAFSLFPMSTALRTAHIVINGTTLAGFVSRIRERGEGNLMEDWNIRFLDHPLALSDGLVPADDSRSEVQPRQHLFANEIKTDGYNASILYYQPKQDELERGEDDPLVPAGYLPDVIIGLDSGMRSVCTAAHQYLRPQAPRRRKQRRVRRPRRQKKKKRKRNFPKWIRRPKALRLGQRPGREIVSVTAREYRHLAGFNRFRAWNESQKRKFFEYKKMADAYGDWSRRDGIKGHAPSPVKGLKEALRKRATVVSMDEFRTSSTTSRFRASSTLLQSSPKTSTSPRERRPRAKSFHVIGPRLRSIHTTVTSCFSVRIRSARRGTGTET

SEQ ID NO: 3163 - protein, 329 aa, Phytophthora parasitica
MCNLGLRALLKRAGIAVPNEDVWIAEADSWWRKLFKIEKFETVNRKFSGVIETDGKAVSIVLRKPKREIVETALDEKDYDVLWGLDPGRRDLFVATNQFGEKIFCTTREFYEDAHYKKSNQKTKVWQENCPDVLEAVRNMPTKKTASLEQLEAYVKFMTPRMDLLLDFRMHKPFRKLRFRRYILAKKKLRQLCQRLTAPAGRRTVVGFGDWSNTDVSGLIKKCPAGPVNSFRRELKKHCRVESIAEFRTSKLHSVCHCEMKNQYSKRLCKKDGVERTLKVHSVLHCTNNGCHGMTVNRDENASKNMLMLLIECKLRGQPRPLAFSRPRT

SEQ ID NO: 3164 - protein, 362 aa, Phytophthora parasitica
MNTLEPLHNLWHAAGVPRASNRHIVRGWQHNAALRMKTNSENAVTLNFYRRLLKQIKRSYYIDKSEAYLMLKSILDPVYDDDDVEVLAWSARIPRKSNGYIDDKPHLLLPLTFIFLSDIEEWNHRNREIWGYEDFRHFSLLPTKKGSSAVISRCLFKIEKFETVNRKFSGVIETDGKAVGIVMRKPKREIVETALDEKDYDVLWGLDPGRRDLFVATNQFREKIFCTTRKFYEDAHYKKSNQETKQHRRERQIKKCPAGPVNPFRRELKNHCRVESIDEFRTSKLHSVCHREMKNQYSKRLCKKDGVERTLKVHSVLHCTNNGCHGMTVNRDENASKNMLMLLIECKLRSQPRSLAFSRPRM

SEQ ID NO: 3165 - protein, 295 aa, Phytophthora parasitica
MATKRPRLDAEDDPGPNSQVRKIEDISLELSHLTTETKRRRQDVAARRAANADKDVSVVKISLKSFCTEQSKMLPWEEVLKDMNKMVLEAYVLANTHIVRLSVRNMPTKKTASLEQLEAYVKFMTPRMDLLLDFRMHKPFRKLRFRRYILAKKKLRQLCQRLTAQAGRRTVVGFGDWSNTDVSGLIKKCPAGPVNSFRRELKKHCRVETIDEFRTSKLHSVCHCKMKNQYSKRLCKKDGVERTLKVHSVLHCTNNGCHGMTVNRDENALKNMLMLLIECKLCGQPRPLAFSRPRT

SEQ ID NO: 3166 - protein, 520 aa, Phytophthora parasitica
MRNNHKKTDEYPDEWDVVEDSQDPDELSLPFEIVAETQDSDEGDTSELSQDLLQLTVTNTKVVHKQTKKSSLKRQQPKKVTAKSKKIQVKKPKRVKSEGTMLEKAFRKGKGFCSVVCRLTSICPDSLLVEEIKRTARAMKQIQMETWHLANIHTLRCLENNLPSPDFGNTFFDHCCSGIYRADRERAGLEETMVTNAGVMIREHFRKRLRAYVEITFGGGQSKKARQERLKKIVQACYNVEETDLLEALQMRDILTPNDEEWSDKWIPWSNHIKGNGMGFYVRLIWEFQSVTSGLFQGSKTPRHRNERDIVSVTTREYRHMVGFNRFRAWNEGQKRSHPEYWKIIAEMPSFKTASSKKYLERLEYFWRHARFLLQFCVDRPFLKWKFFQKRMSQHKGIKGHALSPVKGLKQAMQKRAKVVSIDEFRTSKLCSQCHQTLSQVDYIVDVKLPKKRKRKGVVLPRNRAEVQLEEKTCYRVLRCDHVNCIAHYWDRDVNAAINMVELLMSEILGRGRMQAFKRA

SEQ ID NO: 3167 - protein, 238 aa, Phytophthora parasitica
MPTTEPTDTNTAPRKRRKTSKNRLTNVVEKDALDLARDKLPEGYTPDIFIGIDPDVRILVTAASTGYLPQQRQGRQCKHRHRRRRFRKKDSRKCIAKNQHGHGQRVIGVSTAEYYHLAKLNKKRVWDLNLRKTEPAYVLILKEMPSFNTSQLTTFMDRLQYFVKHVGFLVSYSTKTSFRKWRFLTTSSKMRALTAITKRLVPIRSAQVCIAFGDWSCQDGLCGNPSAPVQALKKELEQ

SEQ ID NO: 3168 - protein, 328 aa, Phytophthora parasitica
MDGYGASRLLFRPKTEANDEERAEKRSSEHPVILTGYVPDAVVGLDPGMRTICTTVTGDLRSNRKRHCRQRRRRSRRGKETLGSHRRKSDHPHWIRTPKAPQRQCDRDVDRISTREYRHLAGFNKFRKWNECLKKRDGEYQRVIADMPSFKTASLKKYLECLDYFWRHANFLLEFCAEHPFLKWKFFMKRMARVAVDAIAKNASFQRSHAYSPVKGLKQALQKRAMVVSMDEFMTSKLCSQCHQTLSFVQYLVATKFMKRKKRKGTVLIRNRPEVQFEKKKCYGVLRCDHEGCGACYWDRDVNAAINMLELLKSEILGLGRMVPFNRK

SEQ ID NO: 3169 - protein, 291 aa, Phytophthora parasitica
MKSKLALMDNESKAKHETMIRQGKKTKEKKKTQLHQALAANHKQVLLPSFNTSEMARKYEKLVTADGTPPTSSDEVTETAVQPRKGKKREIRSSTARAMLAQLHFKFNMLLKYKMECVGGRMIECEEEYTSKTCSSCGEIKDDLGGSSIYRCLFCHVELDRDVNAAKNIFHKNMPAPLRLQRHGAHNATDFARQIISPCSTVSIADTPTTNSPYSGTYASAPTLLSSSLPIITALSYRIDLDTQEMTRSSPISRHPVFYVVSSHSRTLPVRLQGIYVDWMGMLARRGCHVH

SEQ ID NO: 3170 - protein, 347 aa, Phytophthora parasitica
MTVEAKYNYASHLFANEIKTDGYNASILYYRPKKDEPKRGEDDLLVSAGYLPDVVIGLDPGMRSVCTAARQYLRPQAPRRPKQRRVRRPRRQKKKNKKRKRNFPKWIRRPKALRLGQRPGREIVSVTTREYRHLAGFNRFRAWNKSQKRKFPEYKKVFDGMPSFKTASYEQYLKRLEYFWQHATYLVQFWKDRPYLKWRFFQKRMARVAVDTLARRIVPTVRPRSEPGQEVERGTAEARDGGFHGRVQTSKLCSQCRQSLSSVQYPTPVFPKNGDKPKRKKVKGKVLPRDWSQAGIQSRHCRVVLLCENKICQARYWDRDVNATINMLELLKSEVQGRGRIQPFKCS

SEQ ID NO: 3171 - protein, 550 aa, Phytophthora parasitica
MNKGVLEAYLLANLHILRLLKENKEIPKLDGGFFRSCLSAVMKLLRYSKVKGELGESLKIYNSSRCARSPQANGGYINQGRSHNAGYQMATMTKNALSMNFYRRFHKFLKRTYTIDGKKAYTLLKGILSHEEYVRTGTRFDEIVLEWRAKVPRKPNGYLADEAHQLIPLTYLLLQDIEDRNTHGKDAIDEGELFQEIRVFSILPTKKGFECSHMKMCQLGLWGLLKRAGFAAPKPGKGWEDVQHDYLHKLFNIKKFETETRKFAGEIVTDGKAVSIMMRKPKKEAGPARTYTEKDIDVVWGLDPGRRDMFVATNQFEESVSCSSKEFYEEARYTKAKQKIKGWQDRHPKVLEAIRNMPTKKTASLQKLKVYIAFMTQHMDLLLGFSQLKPFRRLRFRSFLFMKKKLRQLCERLAPRGKRVVVGFGDWSNQDVAGIIKKSPAGPVKVFERELARYCTVIPIAEFRTSKVHFECQRRLKNQYSQRLCRDGEIRTQKVHSVLHCLNNGCRGMTVNRNVNASRNMRRLLECKLRRPSLGLHSSGKSVITKKKCF

SEQ ID NO: 3172 - protein, 236 aa, Phytophthora parasitica
MFVATNQFEESVSCSSKEFYEEARYTKAKQKIKGWQDRHPKVLEAIRNMRTKKTASPEKLKVYIAFMTQRMDLLLRSSQLKPFRRLRFRIFLFMTKKLRQLCERLTPRGKRVVVGFGDWSNQDVAGIIKKSPAGPVKVFERDLARYCTVIPIAEYRTSKVHFECQRQLKNQYSQRLCRDGEIRTQKVHSVLHCLNNGCRGMTVNRDVNASRNMRRLLECKLRGQDRPLAYTRQARA

SEQ ID NO: 3173 - protein, 1074 aa, Phytophthora parasitica
MVTGHVLVAALAGSVVSAQRLHPTSQRVKELAAQEDEEPERFLTTKRESAKSKQKQKTSDDLIHNLPGLDPAANVIQHAGRIALHDSDKNKIFYWHFQAAQNPDRVPLVIWLNGGPGCSSMQGLFLGNSPFKLMNESTIGKNEHSWHEFANLLFVDQPVGTGMSYTKGNDYRPDEETVAKDFYEFLTKFLQRHPEYLSDGDDGVKISRAVYMFGESHAGRWIPEFSDHIFKQNDDPNNQIKINLDGVGIGNGWVHPRIQYEYSDYAHGLGLLTFGQVRSLKASYAECLAALDAGTYYSRSCLDNMDSITGSVKPGNGGNSLNFYDVRQYLRNVGAYPSGQENIVKYMNKMEVRKAVHGNEDKNFRFDLCSNGVFRALSKFDGVSTLDKVDSLLQRGLRMLFYNGQWDMMCNHYGTEKLLLNLNWNGSDAYQQAKKYTWRVQGRKEPAGFAQQGDRIDKNKTADFFVMKKTLKSFCKPDAGRLAWDECIQEVNHTIAEAYLLANYNALSQLKAGRPLCKIDTPFYQLCLSLATSVPRRANYEKFLVTQATKDRRKLWIDSGKVGKLKDFPATVPEFSETGYQEWLKTQKVKNADLENANDEFGKMRGDRAQAKTEHLNQGWFQAAAKQMATNAKNSVVPNFAKRLRTYVIEHYGPKRAAAHEVLNKTFATEEFNSTYVRVVEPVITELRKKIPRTKDGKINWVPHDLLPMFYKFLQFVVGYNEEKMGKPDFVEKRTLSLLSTKRGFEASYCKVDSTGLKSLLKRSPGVSRGLWVVHDGQMWTLEDSLKTSAPWIAISGQWWRRLFRVDELEKPGARSLQRENTTDGYGVNCGDRPWANGFHHGGNEDGKVVRFRTSDFYQASGYSRSNRKSNHYIDKSPRVRELLQNTPTKKISSVETFCNSIEFWFQHDHELLSFFMDPFFRKLKLRRYTLRTAQLDCACFELAGARRTKAVVGFGDCGMTGEGLIKCSVAGPVKAFACKLARYCELVVVDELRTSKKHFDCQTTDDLKNQRVMRKCRDGVVRKVPGYKVLHCLRKHGGCGMSVDRDVNAAKNILSILQNQLAGISERPLRLRR

SEQ ID NO: 3174 - protein, 284 aa, Phytophthora parasitica
MGPPPNGVYDTPKNLRFNTLRTFQTNVKSALSNVKNGNIKKFKIDFSSKKKSPSFTISQDGEQAKIREEKSVFYLSITNLKDIRVKMNAHVEISSEIDILNINGFWYVAIPEYVEPTGNVLEFGRGTKAYLDAIRKRRDNAQSVMSKFKNKKKSKRWQYRAYVRAKRTFLSSTAKLKNCVKELHLQTCSYLVKHYDVILLPIFQSKDMFLQLLQAKCEVVGKTVVVCSEMYTSRTCTRCERLHLKLGSNDVFTCPHCSYTAGRDEHAAFNILRYVCAGSLQTYA

SEQ ID NO: 3175 - protein, 273 aa, Acanthamoeba castellanii
MDHEFRVTRTKLGRYYISIPVPLDVKHPIQQQQPNAVGGGDNQAPTVAPHAAAAIDPGVRTPFTVYSPDEARIYELGANDFGRIRRLCHHLDDLVSRTTDRDVRKKRRRRMRRAAARMRRRIRDLVDDLHRRAAKWLCETFETIIYPHYETSNMVVGKSKRRGLHSKTVRAMLTWSHFRFKQHLLHKIREYPSGCRVVLVDESYTSKTCGGCGRINHGLGKSKLFWCEQCGFRTDRDWNGARNIWLKFLTEWCNGSSRGNDDDDKEQQQQQQQ

SEQ ID NO: 3176 - protein, 771 aa, Acanthamoeba castellanii
MQGPLGETNERPWLHNPRNTAIVRHRTRQLIEAGGDTYVPSSEATKYFGVTAACLRKLADRGNLRTRRIGDKGKRLYHCGDLLSQFPAVTRSEDGRTIQTTTRPPRKRIAYARVSSEKQRPDLERQIAELRRLCPDHEIVSEVASGLNFRRKGLCAILDRCFAGLVDEVAVLHRDRLARFATELLEHVFKRHDVRLVVVGQGDPAAAATLDALDPQRELADDLIAVTTFFVARQNGLRSAAHRRARRDRAALEEGRGSTTSEPSEEESEERGGSEESERDETDGSSSSSSSDDGGGRRKRQRTSRRRRRRREAEAEGTAGAEGGGDGEGGMVAFDGKTRKICVFPTAQQKTLLKRWIGTVRWTYNQCVAAVRGRQCAPTKKALRARFVTEFGLREAERIKRAKSGVGGGGDDDDVGISWVFETPHDLRDQAVGQFVTAYKNAVQAHGRGKFDIAFRSAKRLQQETVVIRSRDWNRTRGEYAPIFGNTVLRSSESLPAKMDHEFRVMRTKLGRYYISIPVPLDVKHPIQQQQPDAVGGGDNQAPAVAPHAAAAIDPGVRTPFTVYSPDEARVYELGANDFGRIRRLCHHLDDLVSRTTDRDVRKKRRRRMRRAAARMRRRIRDLVDDLHRRAAKWLCETFETIIYPHYETSNMVVGKSKRRGLHSKTVRAMLTWSHFRFKQHLLHKIREYPSGCRVVLVDESYTSKTCGGCGRINHGLGKSKLFWCEQCGFRTDRDWNGARNIWLKFLTEWCNGSSRGNDDDDKEQQQQQQQ

SEQ ID NO: 3177 - protein, 734 aa, Acanthamoeba castellanii
MQGPLADLPTNSTSRPWLVGPRNTTKLNHRTRQILESGEDAFVPSNEVTKYYNVTAACLRQWANKGEVRVLRIGELGKRLYNAKDLKSKLVGRDGGAQQQRQQQRKRFAYAQVSSEHQRGDLERQVGELRRLCPNHKIVTNVASGLNWKRKGVRAILDQCLEGMVEEVAVLHRDRLARFGVELMEYLFAKNDVRLVVVGEGATADAETHAVLEAVVDPAQELADDLIAQPWRKQQAANLKTAQKKANRKKASAAKTKVMEASGDGDTNQPGGKRKRKGKERAPISEEGEEEEEPAPYDGKCRKIRVFPNRWQKDLLKSWMGTVRWTFNACNAAVRAGLSGHSEAELRSRFVDNEAFGKPHLPGPSTLWVLDTPRDIRDQAAKELSAAYKNGTKAHGKGKFEVKFKSPKKMAQQCITSNARDWGRGRTSVFHGLFDSGRALRASEPLPREMKHEFKIVRTRLGRYYLCVPMDLETRGESQAPSSSDDVGAECVFIDPGVRTFVTTFDLSGRIHEFGTGSIGRIEKLCRRLDDLISRTYAKKPDDRQRFLRGKKKRWRMRRAALRMRRRIRDLIDEAHRKIALWLCENHRVILWPLSGVSNMVVAKEDLKQRKRRIGAKSVRAMLTWSWYRFQEWLKHKVREFPWCRLVLTSEAHTTKTCTHCGTPNHDVGRSEVFRCADAACPNRSAHRDHHGARNNGLRFLTEWANLPTTTTTTTMTQRLPTRVIDLTTSGLND

SEQ ID NO: 3178 - protein, 690 aa, Guillardia theta
MSNIRIVKRKAKGFFKCEDLVTIKDAVKAAHRIMSDASILVRSYYLRWFQSSYPLDSDDKELELEHFHISMACSIVQGITRPPVRGVGPEQSVKIDVFNDMLDEYKRLYERAPNDKENETDLSLSHVLAYSIDNLLTAYKNNIEAHFSKYVKRFIRCDMLAKGFNKSEANRVAAIYTNAYIYDSSLDLEPDFMERLGLEATSYSSLFPSKINKGGFPRVYDLKANPWVYLPKMVMINQALETDFSSVEHKERRLLNPLPFYSSFVPMHIRIDTSGLSQLLMTKDRLDDFKRSYLAEFGVSLNIKNKGDMLASFEKIFGRKATSNREAGLYATEMWSFLTNLKTCRQWKELDGVVRKNDPKGTQWMFDNAVVTDGVSISFQVIDNSMFGRKAFSGRKKRVACQEANDEEDSKQVTREELKTSKLLGCDPGKRDILAITDGIKTICYTKGQRDMDTHKTIRLRTSLKRRRGCGLEEYETQVMNRFQKRSCHPEMFRRYACSRKRMEHMLLECYSHPVFREFKFLVYNKTKSSEHRFMHRVLETFKRPQTNLSKARCASGVMRMNALKEVQRHGDIIIGWGNWGKNPNALRCSAGPTPGIGIRRRFESLFKTTTVPEHYTSQECPSCKGRCLRKATGNPIMRHHLLRCTNDSCCSRWWNRNVAGAFNILTRLLDGQTLSGNETTGDGLGGDDL

SEQ ID NO: 3179 - protein, 1464 aa, Rhodotorula toruloides
MSAVTSDEYMPKIPWVGFTSFVRSEAFMSMANETDWDAVMAGDADAIEELMVEMAVAIGALTDNDLEGPAPRADDGADVAMLDAEGSGDGGGAAGEGPEDEAGDVVMEEGDAAGGAVDQGGPASEADGAQDGDEQNAPPPAPDQRRPTPKEQRLRWFNDIFSIDQLVKVMKISRGDDDVPLGSKKEAYRQLVDELKGNMKQAKADAKVGRPNLHLPFGEPPKRPDWMPARRRPGKKERPPRLEDVPWLSEETWARLKATTGGTPDPELDKPDLRLSRLPFRPRIQITRPGPPPSNIVADAINIATELHARLSRDPSLIPQKASLKGDDKGETADTTKKKKGKGKAGEVVEQIQVKGIKELRWVARQEAAKLEGEEDDEGGGGSSSKKSGLKHSGRLSTIQKPFDSAFNTFAVRASAVEESGLADEESDEATDGSGSDDSFLYIGSPWRDLIEVRLLHHQLEWLVLVDVLNGLLERATSLSPLHSFVRRFYATNASDNWRQTFGQLARLIVKLQEGRSATPSACDADDIADATWTELWQTTTGSSTKPSPDDLDRLKTKYGDLSAHDVQACAKEKLPLFAIDVIRDVDSHLQIKLAPGITILFYEQTAKTIAVNFATRSRKRVPTVVANVAAFLSEDIIARLPAFVDGLATKIGIDVGTTSLHAESFDAPVQALARDISSKQAMRARNILRLRLETLISTLPLKFDAKSSWSRGTIEMLAKALSPVDQNFRPPRKGQPLVATDTAIDLASSIVTELGRFSSLITKYLALVNSTAKANPTATLASLAGGRAGGGLSITDLTLVQVAWEQQLGQTPKIRYRGTSLVLPPTMLAYHLIKHDTIVTTTLGNVNSLVARCNEAVHGLEVRESAQPPRKDPLSAAPLADNKQRPSHKAAPSAMTILHARARDYPNQLLLEHAHSLHLFQVDTRSTGDCKIPRLVLDTERMRALEVFCKSALAIGPKTKWAASIWDKCPLAAVPFLYAAPSPSKSGLLVHSQTTVTRHAVSFLMLNPNEIKDATPWQVSQSPRAMLESTWRGGGKHSKLLSNWAETGACRAFLEASAASPIQPCVYARDAIWSPCTTLVDGILPIRLKGTKVVLTDDGEDGGADDRADDDAHGGVFGKRKVDAPRGRGRTDAKSTPSATSHISSALDTFFPSRFSLTAPANASTDSDGNDQSESRPEMFKIAENTIFVPIDVGERNTVSAAIISAAFEEIFHVEIGNHQFKAANKQQAETSARILRESGLAAVRDAIRANGGDGTDNDLLSLLDTLSDCNPKTLALNWEQRQKFNDRVRRLTHAIAALVDLISRDAAKPEIEERNIVVFIGPKLGQRSSSASGADRREQVSGSLITALRALRGTDDNLRVAVLEASEFRTSFTCPSCRIERFDQHKKEKIAYAADLTTGFDVFRVLQCGHCKRVFNRDWLGAINIGIVGIVSAAFSGLKVQVFSDWVEGVFGWGRTKKRGRK

SEQ ID NO: 3180 - protein, 1665 aa, Rhodotorula toruloides
MGIRGFFQLAREAGAMVEEFVRGGPAAVGRVLAGWLREREIQVLFLDVSSLTGHILVQQEQRQAREDRLGERLPHYQAAFTARSCDHLHALLLPIRAALPDLAIHLVSDHFDYRPSTKEPEIEKREKKRLTVWFEGAMQLVKEVRRKGKNHVGHAQRLLEKAGLAEVHSGLPKGAVGLHRVQAEEIAGCSSASARWQCDNVLLVTAPSDADGHLARAALAASSPCASSKPRPLHGLVEPTQHLDLLAKQSVSPARILTLAGDSDLSANAGSGVARFFARINWQTGGASLGVIDKRDLSLSLGYSTSGVELANAALAMGQDSTGSGILGLGIKAVVNPKPEYMAFAAEDWGALARDDKVEEQRLWDERGGSLEKALKVKVPEKPWGEEMRVFRGYEGAVVSKMAVMERVWVTVRDEAQARNPNPSPPRRHNLGLPTSTPPRTAPRSPKQKLPPSPQTQFVQVRYRPQVPTSADQLAVLDATKPANPAPIVTPTETPSGGKKRKRESLKLKVPSVEAGRQAKRQEKEGKKADAIEGKEKGDEPAGDKEKVPQATPIRDSAPTRTRRINLKNAVQSADLLYILRLANIVFTSVAPVLISSSLSLLLTSRKRFDKASIGAIRLAQDCADCTADVFKLVDLVLDFTLNQSRQGTFREASLAETARQELGRGADGSAVAAWAEEWDSLAEEEQNVALERSLPLGDVRVAKSVQQHLDIPPVIAVFLLYPGAQAILKDLVAQASTAVFVARKARAGRFVADLVSSILLGGVNGTPNLDVDIDDATAASRARLAAACHDDPALEKEVVYICRQTFLRTPSHTILPSTELLNTLSTFAQSLSPDLEQRFASTLSLPSIDDLASVLVICTQVASRLIIEAADATARTQYDEDEALRPKNLAHRGNSSRWRDSVHELLVEKLVNAGIVAAGAGRPHESAWSVEECDGAVLAGRKALLDLSRRTVKRNPSEKAGSAAPAEDKEEGEADEEDSKEQAWPMRRSSFAQLIAGGASTLLSPEILLFFLEEQLSQSSASVVKDEAGLSSTTFLPTHAPMSAADACSLISSIAEEPVIVPRVAATLKDYIPFLSRIKSHDRKTDDTLGKSQDAADHFYYCSQLLSLLNIDCTTLSPHAPTAAQDRTLRNIAAQIEATWSGGVISVGRKPIMKPTPRQILQLASGDLLEAFRIVFPSFKLPHLPRGSVTFSHNRIHVHILRIDTPPPYLLKSLYGSAAATPRKLTVGCFLRDAYESAKSAKYFTGLALPPAKLVEQHSPSTSNTSTFFDENDQPLDRRLAERPVTPRQAQVKPALSTLPSVPWLGGDNLVELRRFLGLQPDGSGGYDKNVLVIAFNLGSKNVGVGCAERPAIPGSVTCIRVRDAVFLGSERELQRRAQQKATLSSNAGPSKRTAFDCQRQRQKLLDQVAHEFVSEAVKTPPHGIGWPVVEKVVVAIGGGDIEAAFGQRGSKAAGPFIASIIQHFEAQFGKGNVVARIVNEAYTSSRCVRLPCRKKDNKPLVKYVWTEGPRKGRQFYRILYCADCERTINRDEVGGQNILTNVLSAVRFGFGAFTAKFAARMGLKWKGVGDAAQMGGEGEGEGVGEEKGEGEEKGEAEVDDPTTAQENPATTSAGTADSPLADQSLPADVRRDLNELEDDLYLHPEEYVVRRDAILSRVRQTGS

SEQ ID NO: 3181 - protein, 1679 aa, Rhodotorula toruloides
MAVKEFTSWIYRKAYAQQQAAEARKEAARNDAVGNFVDLEAVADHLRASMDQSQPAAVIRETTSLMFGTHLDACTRYRNTATGRIDYAKVHAAEHAALRKQDEVLQNLSVAGVMTINTQDHDFFKPLPKLGEIKKRRRRGGYSGGKYSARDVERAAETDMIDMLEYSVTVDQQYLHRDDEGDRTVTRLLNRAREIRTGVPGAPDRDPKFEEVAALLAQVPPQNIVVLGRDNDLIAIDTHLERRWVVTPRMGIREPPLFLRTQNVPRATASGVGVGKGGKASTTETRQLTVSLFDMDGVDRLLPLDLTRVDRAVLAALIGNDYSNGGVFGVGVNTILAGLIDEGHKVEWTLENALMVRDALNTDLGMLNGSSDEAKRRRTTLGLHQSKSIVQVGESTVRGLIDAVDAALGRDVEIFDTREIPWVEHHNDDMRVRFNNGTRPPPRPYDAKGAEKTFMYRRPVPGQPHAEQRRFPPSPSPFLKLPNPLVPLRNSPMPRADDTSTEANRRRELARRIGSSRSSTIRITAISSGASLHAAMLRRAGTERDEDEGGDEDEGGDEGTGDAAKPKPKGGDERKSKRKGKHGGKRGKGKKEDNSAVVKGGQEGDAAPEQEQEPPSNDKDDKSESRVRLDSQFDTVCTDPLRTRSIERTLHRDQIELRPPRDVPQTSPTPKQPSAPGSAKQRTRLASSGIPNSAPRVGGVFTGGNRPRANGPANIQVARSDKPVADILSLLSLSFALSTLEQNDVADEWVGACGTDDDFSYLANKARGRDFHRDLARLMCGLGGEFIKGGGQGEGGTLKKVGSGGQAITLDEHHVAAVRAVEAKRPPNVVRPAEIGQEAWSVVVNPQATAILKAVVDKAVLSLGALGSALAKDIDTLVANGRSLRAEWVDIGPLPDLETYLRIDLTGADELARFKQLLASVLPTILVETPFDPQRARRGASPAGKADASQPAKRRRSGRTKSAADAAQAPAAQPAPAPAPAAAHPVDSSAWTQLFEKGEYEALVKFIRSESLSDLSDSSESVSDASDSREPGRGSSGRVLADLERWIDGWLAWRDRSVRIAAGSAAAASSLAGRSFAEIVEEEKDVAHGLLPFFYRCEKLRGVDKPLPTVEPDFRPLNIICLLRVMGSEYFQAFVERAAEQVQVAYDSLRQNIKNKADRSTAHLLTFEPLIQLFENADGSGLPLWVHVQNGDDVELRVKGSIVDGIGRVIQELRDRFGCATGSLNEFIVKRGAQVEAMYQLFKTDRFPRTFFASGHFLFSFSEISFVGHHVDGPKPWLVKTMEKGPTVFLTDAGIAMSYLVHHAPNLRNKGGWSHLDPVKYDRGMDKDRLVEYVVEGGAIRERRIGTRFRFFGGNISHNNLLGKILEHRRNDLDLPRDRRPLEAIEKPFRKRFWSARERPTEGGVPDNWWRCYTPGQANALRRWIGGTPDDKLVLCACDPGENSPVTVFNSVANEHAIGGRSEGFASVAANNFRAITKTGQRRMSAFNVAFNNEFSPTFSASSVSERAAVYALRKTNQVGYGIRRLTKVRAKAIYRRVANELADFILGGELQKGVGVDPETKVVLAIGHGFKTKRRSEGAGTTLPLLREVDDVLSRRRVEHRFVVVNEAHTSRRCSNPDCVDDEGRRSRVKHATLGSGSTTRNLLHCETCDCVYGRDAAAAANIAASLASLLQTGRAKW

SEQ ID NO: 3182 - protein, 1766 aa, Rhodotorula toruloides
MIPHLPAYIELFPDTYQDLPSPARTDGRVLVQAVKDLPVQVLLLDTNPLVFSALRSITLAISKHDPFLARLRQSTVTQSSAQGSTAPPAPFGPPLPPDAYENTIADHVVRELERLVEPLLKFRSDIRIILVPDGRLRPLPKWWECVARDLEAARATWGRWERASENEEERVWKGGQADKRIELLRATFAPLAGNADLEPVPPTVLGLRAPLPQELYAAAKRNSSFLLHQAIFVDPLIDADGALAQLDPQLARPFDPSFSGLPPDRPLHLFELNAMLSGRRSEELGVVSIDNDVVINSPASAVRFAFIFRSPKTGSTLRVVDKEKLAEAASLASFGPSLAHLGLVLGHEYLLGGIRGLGPVNLRNAAQLFSPFLNLEWGNPAIPPSAGDAEAWREWTEYFATLGFVMSFTLEDYREASAALRGLDVPLFERSSTKAVAWNVVAQERSEKAGAGQEIKPVFHNFRLSPELQAHFASQMDESTSSHPFRPHDRSLRPKPSHLSPLPPDPPSHKTKPCRNLVSTRLMPHVPSVVDFYTNLQPVPTDEKAPKAKILSRKRGFGTVVPESADAGRSAAKRQQLRLSRTTGDAGAVDAPGEKAAEKGAAGKGPGEGAVASAGVATEEDAEEESRGKGKAEAEVKVPELWRHLKLTTIETDFASSCQSPAVYETLSAIRLPMHFIFPRLLNILIPNLIASSIDSNASSSLARNLLSGPDAIRDSVWCSINYMAEKTSARGVNESMEQLLYHLVGPAAPEARIAAAASRVGRLTPATRTRIQQSLLGVAACETLDGIKLALRLPDTLYAFFSTPTARAALEETVVDFSASLDKADKDRTLISLRDLFSRFLSSPSEAVDACAQIFETHASWIMQIPRNATSSSNARHTAFELLDKFTELVRIVKQDATVREPFLVLDASLTDEEKEELSKILARHLACAPLCVTDDDAETQRTRLADAFVNKVSKILGRVPNMRDSSLSVADAARSSFLFLARLLAFLMSAAVTSSAALDYDEAHEPAHQQGHQSAWADERHKTVGRQLPSGHPRAVRQVQTGWSLQERLTAAEVALVRAEIPRSWDRKERQGSASEEGEEEGDDSTATGTGEFEDAQANETLGALAHSLSGKARTILPPSSARIILCQLRRATSLAQQHTAPTTRPTPSSTQTAPPQVLSEYLATAYSAKTSIVYAPRSFSVLGPHLACLILQLGLWSTSTRTADGLALSDIFSATAAAHARLAALTRLAPEAARVRLSARAEEFDSSSSAIFRHDIVDTMRKVAEELRGVLAACSTSSSTPKLSQLQELAIQNRFQVVATFFKTSKLYAPHGLVRLGNKRLQVLYLDFGSPSRKLLDYIFGSAPRPHTMTVGSLFNRLVADPNATKLFHLLRSLQPPSDGSSPFTGSRAGFVDEDGLLVPEVAQKHLNLYPLHRPSRPRIAALPLPHLSPTAKTTLATLRHFCGFREDGTGSIEAGTTIIGIDVGSTYSAVGYSEVVGQEGSARAVLVKNGHVRAFQQKASRNQVKVQLGGKKTGRFYRRRGRLSQAGRFRVRQKYASVTAQLGRQLFDALVPQPAKSARPRPPAAASSSSTSSSAAPPLLPDPIKTPPKRRSKVLVFVGAGGTAADNVRGKHAIDAGHAIVGNMLRHGQARPDVEALATTVDEAFTSSICPKPTCRKAKLQWLAYFRHVTTTGKPSSRPFYRVLICPVCSARYHRDVVGASNIVQVGVVLLKHGMNLHGADFTTTFGFPAVPARKVDIEKGKESTSHRGDVQEGEWEDIASE

SEQ ID NO: 3183 - protein, 678 aa, Pseudozyma hubeiensis
MRSVTLTNVPRADLTVGRGPDIYPFYDANLEEQYRYLIAPSDELLARVDENRPTGNALERCWLHSKTSTFSYPGLTQTLYLPIRWPFDSTTVIDQDHAAFRTDRGLLDPADLGDQVETALGAATDTAANNNNNTITNTTTTSMLNTDNLGAHVLKPEIGNIRTRKFSLKPSTKLKEILRDWRRCANVCFNETLRYINHARSLRELPSNYKYDLYALICNEQSAFVKKHPFLKNCPSQTRRHAVDEALAARRSIITRYWNTPAHVRPDPDQMPQVGPATKKKDMHRGFGVFFPKTCGSVRFQQEDAKIIDLFLYVAPNTVKYKHVGGREADCLVPIQLRGQEQRRFLVDRCQPIPMKTQIKYEFKHEWGIQLDRYGRWNLLFTYEVPLPTSMAAENEFEGPITVMTGDPGVVTPLSVYDSSNGTVIDIGSAQDGARLEKLRRENDKLQSRRSSPSDQAGPQRRPPRDRGAQQARRKPRQPRQPRSPRHPRLSRQPRPPRQPRPPRLPRQRRPPRQHQHLPALSSAERRKLVKRSKRIGRRINNLVTDLHCRAANFLATSADVIIMPRMEVRQMIARRRSGPRLTRSTKRRLIGWGHCAFIRRLAIKCVDVAADTRYNIPHPTILLVQPEAYTSKTCGRCGELNHSLGASRHFTCRHCSYSADRDHNGAYNMLIKAIRRS

SEQ ID NO: 3184 - protein, 286 aa, Pseudozyma hubeiensis
MLADVQADEDGEVSGGVLAERSAKRSADNALIRPLPGPRRDAHRRPPPPVPARQPRPPPPPLPPPPPVARAPPRPGRRNRSVPFALSAKRRRRLDRQARAIRYKMSNLVTDLHCRVAHHMALTSDVIVMPRMEVRNMIRRRGARLHRNTKRRLMAWGHCAFLNRLSIKCRDIGTDQRYEKRQTVLLVQPEPYTSNTCGQCGHLNDRLGSSRTFACSDPECQYVADRDRNGAYNMAVRAICSARVANPVAAKLSDLSNKRVLNFFPTFGINIIYDIRPAWNPTVHAA

SEQ ID NO: 3185 - protein, 842 aa, Pseudozyma flocculosa
MTHYRPKADLSQRFVHAGKRKRDTSPGPAPRRQRTLIVPGEGRDRPRSPVMPEEPMPLADFRSVAKPTGAAPTTSTRPTSSASQASSISRTDPGAPEIRQPSPALASLPPRPQSSISAARRAGPIDGDTLAKRPPAPLPSSLPSKPQTRCHMHAQTAPGGAAAVAAGQLAFGTSAQSSLPQPDARRIPRDGGSTAAQTSEAAKASSVSTLPAKPQLRPGGPQASTRADISRTPLQPVSPNSTPLPRPQAGVPEARRSTSTVTKSLIVPRSCRANSGVTAQQAASPSSTLLPRPQAGVSEARPTTSTVRTPIASASASAGEARDVVGGAPTSAQQDPPIASPPNTSEPSSAKTKATEGSNEEPKRDPWWTKFVGRLDAFLPSVHGTAHLPYKPETAPPRPRRRHLSNVDPKSGKKRTWYQATQMRLAAPKKAFSLPDVVIKAIEAAAAQPLKRSNYKGHRRRIFPTPYQEYKLRLAIIAINRTYNLAVTFLQERFSEDWYKKRPGALFAEFNPMLQGRFVNAATVSDECRGLLKDAPACTRKFAVHQAIKAFENGIKTCKPFKVALRELVRGYGTIHVQKERVNSEKGTFYTTYFDGEIKGLRGLKLPHDTTIIERNEKFYINVISDRHPLELPRLNKDDKICSIDPGVRTFATVYDPHGQRVVEVGAGDFARVWRLSRHIDRMVRRLKHLDKKRWIRMVKAIHRARDRVKNLVSEVHRKLASWLVSNFNIVQLPPFNSTRMSARAKRRISRSTVRSLLTWGHGRFRQHLLEQARASGIRVVIADESYTTQACSQCGELKKIGGSKFRRCPCGLNADRDANGARNIMLKFLIEVLFQNERPKD

SEQ ID NO: 3186 - protein, 904 aa, Pseudozyma flocculosa
MSAIKQRKIACQCLGCRGDPPTRCLYEGHGTELSRSAGSAREATAVAPWFEATPLRQGEQDTIAGQGEHHAIASQGEHHAITGQGEQSTIAGQGEHHAITGQGEQSTIAGQGEHQAITGQGEQPPLIDEPMHAAFARRHRPGHHGGRRPHGRNHCRGKRRGRRPRAGRRHRSRNRRRAPRHPRQHISRRPRRTRPLREAIKSVKGSVRNCLGWRPELRARLEELFVRVNEVDRYVRLFLKYACVRILSDTPAYDLSPLHDPQVIMNVWKALTLDARGGLRDCEPLWLSQHLAAFLELTGYRRRAFANVDEIAGYQATKIVTNHTNTIRANFGKRLRRLLMLSSDITAFEHDREVLSSFKRSVARGTPTASADPRLHRCREAAQRVLAGYPAGWAFQRESIYYDVVARPGGHIAAFHQLGLALDAAERHPVDRKARQKMQRRLEAAQRRAAANPDAVVQTPEPRSPSYYPLADGWIPRHIRIDTRIAWNHILAKAKNPPARGDVLDVWDEIVDLSRPIFRHHGQIDPDVTTLHDGILTFEGSIETDAVAATVQMQNYSGRSLQRTTRHGGDLGDGAIDLEEPYIDSLLPEDLDSVLLMDPGEKAIVSGMLFTSTAEEPQTIAYTKAQRARDMRSRRYAAIREAVKTRAVREAEADLSMGNARTLDLAQFEEHLRRYGRHEQVLAAHYSTTLTRGSGDPLHRKFRLAGYIRGERSYRALAERIKHKFGRDIKVVVGNWSVGAGRTPSRGKDFRAAMRRNGLPVYLIDEWGTSVCCPTCHGRTLSSYEPPSAPGRARTGKVWRLQRCSRCRVQVDGQDDCQRIWQRDTAALINMASILFASAHGQPRPRHLCRADDDSDSDGDSDGDDNNNNNNNNNNNNNNNNNDDNNDNNGGSAALACLDRQAGT

SEQ ID NO: 3187 - protein, 720 aa, Kalmanozyma brasiliensis
MLPPVKLTNFPRSDLPRRNADRGVHIYPFHDPKLKGKYGQLPLPTVANASPGEILHPALKPKKTWFDVKVTNFNSGSGRGTMQRWPFGKTTVEQTKGRMPSGQGTVYMDDLGGVQEVLEEANVPIKTDVANANKDDAPPKKANTKKPDVAKKPDPFPTVLAPEITGTRTRTYKLEPSAKLKKVLSDWHECVVITKNEAIRRVNLVQDYKALSDFQLKRDLVNNTSDFVREQDRDLKHSMTNCPVQPRRQAIVEAVAARKSLLTRAGKTDKLFDIKPVETSTGFELAFAKTCGSIAFVTNGNKRPKVSKNGSKRRKDGKDSSRGGVVDPDRFANPWLVMTPMKLKEVKVSPYVEMRVRGNKNRQELYDLLKGDKGQDNGDGGDKKDDEDSDDKDEDKAVDSASPANELEERLQLPREWRIVRNSQGYWLTIAFKVDKTQPKVKTVFQSEMAVTGIDPGARTMLTAFESVGRTVEIGSKEDAARLAAMRVKADKLKGRRMEKVGDRPDNKKDDDQDKSISDKDDSQDAKDMSVDKKGKGKARDDEDKPVDTVASTPGEDDSEGDKRPFVLPAKQRRRLLKVEKRILAHHRNLVTDLHRRAANYFATTANVVVMPRMETRGMIRGRRLNKKVKRTLMAYRHCEFADRLYIKAHDVQHDKRYNKHQSMLLAQPEAYTSKTCAKCGHLNDKLGAKEVFECSQPDCDYVAGRDHNGAVNMILRAIR

SEQ ID NO: 3188 - protein, 487 aa, Auxenochlorella protothecoides
MHQKPFRKVRHQAYVGRERAINQLTEQFRAPPGMTTIVGVGNWSAQDRGGIMRGTPPGPWIRFLRRLRRVCRVVVMDEHRSSKLCCACHATLHAHQYVRVRNGVEKLVDVWDTKRCTNRGCKVHVVNRDVNGAANMLMLTKCFFANALRPTAFGILLHYGDESTHRYSSSRLFVQCAASCCAEKPLAPNSRGGSIFTPNGFESHCGLAHRKKWRTTLRVFEPGKALQSLGGGSDGTPPAALRALRELNHGCPGQGPTEVEDGDAGLLEAMEQPGRGSLDCSPLCHQQAGADPQAEADAWTLIAAQGLMPRDDGGRLVGQEAGPQGRMADAHDDGAGGTEVFGAVQGLLLQLLASTGLDVAPPPGSAIPPPAAPQQSASSASAAAVASPPRAVQPSAGPCPLRPPSSGWCLDGLALRLSVMERGYQQLQRVVQVLLKADLELSAEVHALRSACAGCCHTMAHPGRPMPRRSLKRYRDEGGFLGAVHGA

SEQ ID NO: 3189 - protein, 719 aa, Auxenochlorella protothecoides
MKSPPTSVRGVHPTAEVLKALDLDNSRLDDDNEKAAIKDCLLEKDAEIHMVVGEDPGRVGMFTAVDEHGNKTACPSKEFRAMSGCSQYEKTVKGWHAKAPPCVQNLHNCPTFKMATVEALLKRIKAVATGGGHAEGPARALDAGLAAPAAGVQGGIGGRTQDEQAVLCLSRHLAHPPVRTGAARSAGDGKVWGTKRCTNRGCTVNVVNRTVNAAVNMLMLVKLFLASLPRPMAFGGPPPPVPSTPVPPTAPPSMTVRHRGNRLRMSTILGRCYAAGPPGREKGPRSFFLLHDVPSSPSHETCMALVQPVQKFRTAPCLSKPEEHRTPPYGTHACANSSTKPTVSSSRARMLSGQAERLLVPAPLSRRGDRAFSRRTMAGPTHPHASGSRNGHLHGVAEPTPLATAAELNSLRREVEELRQLLWAHQQGAHACPTPNTTRQIESGMPDRREEGMFDSRFHSTSSGATPRDFRTLPIRIVLIRHAESEGNVDNIAYTYLPDSRVPLTTYGWQQALTAGERVREVSSGDAHPPRLFFYTSPYLRSKQTFEGVAAAFDPGQIMGAQEEVQLREQDFGNFQDAEGKQREKAERLRFGRFFYRFPNGESGADVYDRMTIFEDHLVRDINAGRFGPDATLVLVTHGLALRIFLMRWFHWTVEEFMGVFNPPNAEPLVLERSRMVIKGCSDVMCSISMDAQSRELDPLENSFYAPSTAASEPTTTAV

SEQ ID NO: 3190 - protein, 241 aa, Auxenochlorella protothecoides
MRCVPPLPIPPEGPFTMADIVVACPTHKTASTEVLLSRVAWILPNLRRDLAWHMHGKPFRKLRHQAYVGRERAINRLAEQFRPPPGMTTVVGVGNWCPTHKTASTEVLLSRVAWILPNLRRDLAWHMHGKPFRKLRHQAYVGRERAINRLAEQFRPPPGMTTVVGYVRVRNGEEKLVDVWDTKRCVNKGCRVHVVNRDVNGAANMLMLTKCFLRMHLAPQLLVDPLLPLPFLLPPTPRFAI

SEQ ID NO: 3191 - protein, 936 aa, Auxenochlorella protothecoides
MSGAKRREGVIAKWHADAPPLVKKLHQCPTYKTASTEVLLSRVAWIVPTLRRALAWHMHEKPFRRVRHRAYVSRERAITQLAEQLRAPRGMTTVVGVGNWSAQDRGGIMRGTPPGPWIRFLRRLRRVCRVVVVDEHRSSKLCCACHATLHAHQYVRVRNDEEKLVDVWDTKRCPTYKTASTEVLLSRVAKIVPDLREGLAWHRDKKPFRKLRHQAYVGRERAINRLAEQLRAPRGMTTVVGVGNWSAQDRGGIMRGTPPGPWIRFLRRLRRVCRVVVVDEHRSSKLCCACHATLHAHQYVRVRNDEEKLVDVWDTKRCTEQRLQSQRQDKSIVYRLFTAPSCAIDSTCAPEFDFLQHAVVQITNPMTSNFCTGTLLKGPGDKIYVLSAYHCLAFMGKRFMYPWSTFSIIFDYKLPCNASYVEDVPRTFDRYLTGLAVVFQDVYSDVGVFELLQDIPPEWGVVLAGWEAANLGSNFTYTCISQPAGDVQKIAYGKVYNQIPSVILDAVNEEVDVYNVSCSTHACNFYATHVQHGSMTHGSSGAGMFADELGKIMGVLSTGRGSVCPGTVNKDDPRPSRVVFGSLGGAWEHGLHRIFNRSVEDEGGAEFEEYTRALPTITVGNIVPEVNPRKGSTSFSIALQQEPDKDTTISLTPTQTDLVSVTPQTLTFTRSNWRTPQFVSVTAGRAHPEATLQFDVALTWPVVSEAGGWSSRTKTISGVVWAERKGNSFFNPQEVRVPFRHVMDLERYNPQIPLITEHNGPFIPAKYFVYTAQKTEVTRKGWAYYFVAHPRTQVTIPGQSKSLNGKASMTIASMPLAEAVTESLNPTRLRIPAVPSHAVLPITIAPVLAWLDLEEDHTLNITTCSNKTDVGAEITVMDDQLEVIRTTGLARDNACVSIPSVVVEGGRRYFISITPVQYQFSLGKKTHQVDIHILDA

SEQ ID NO: 3192 - protein, 475 aa, Auxenochlorella protothecoides
MANRGGGGCPTHKTASTEVLLSRAVWIVPNLRRGLVWHMHEKPFRKVRHQAYVGRERAITQLAEQFRAPPGMTTIVGVGNWSAQDRGGTMRGTPPGPWIRFLRRLRRVCRVVVVDEHRTSKLCCACHTTLHAHQYMRVHNGEEKLVNVWDTKRCANRACKVNVVNREVNGAVNILMLLKRFFVNALRPATLGSGGYSYLYEPLWWAGFLSMVVGELANFAAYAFAPAILVTPLGALSILVSAVLAHFLLNERLNGFGVMGCILCVTGSLAIILHAPEEQVFESIPQVWALVVQPGFLLYAASAVAATLLLIFRVPPDVAASNPLVPIAICSAVGSLSVMACKALGLAVRLTLAGSSQLGHPATWAFAATVVVAVLTQMAYLNRALDLHSTALVTPLYYAGFTSLTLLASAVLFGQAAGGVAAASQASGFLTILCGTTLLHATRDADLAALAPLLGLARRAGEDQPAVELAKDARV

SEQ ID NO: 3193 - protein, 594 aa, Auxenochlorella protothecoides
MTRKNVHGGAPLGAPQGRGIADEYYRRDRPPEDAKVHMYVGIDPGRTKMYTAVDEHANVTSCSSKEFHAMSGSKRREGLIAKWHAKAPDYVKELHQCPTYKTASTAVLLSRVVKIVPDLREGLAWHRDGKPFRKLRHQAYVGRQRAITRLAEQFRAPPGMTTVVGYVRVRRGEEKLVDVWDTKRCGNKACKVNVVNRDVNVAANILMLTKCFFAGEEKLVDVCDTKRCANKACKVNVVNRDVNGAANILMLTKCFFENALRPTAFGRPGLRVLDLGTLPRVESPPTELRARKDKLAYFERQCSPVGHGLFVGAECVARNRESLREAGITHVINCVGFLYPAYFSPELEYRTLYLQDTPAEDITCILYDVFDFIQAAVGHGADPAGRVLLHCSQGVSRSVSLTIAYLMWREGRPYEEVFASVKAARGIANPNIGFVCQLLQWQKRRTTGPGAERLYRLAPQSPAAPQYLVPRSAKILGSAGLDPRGSFVLHTSTALFLWLGKACPEGFAAAATTFAAQLERYEAAPAPALLQRDGKESEEFWTALKAMLSSSTGEDGPEASGSWRAAAVCEIPAYDKDYEVGGCGAFCSVTDRSE

SEQ ID NO: 3194 - protein, 287 aa, Auxenochlorella protothecoides
MKTDCQHTFTIKQLRQDSKNSIVFYPDIGHSGHSDATFQCLRLSRCPTSETASTEVLLTRVAWIVPTFRQGLAWHRDEKPFRKLRHQAYVGRERAINWLAEQFRPPLGMTTVVGRVCRVVVVDEHRSSKLCCAWHATLHAHQYERVRNREEKLVDVWDTKRCVNKGCRVHVVNRDVNGAANMLMLTKCFFANTPRPTTFGGPSASPSFPPTLPPTRFAIRGNQLRQRYPVHGNKLLATGASPVGEQGYSVLSLSAHGCHPHSLPCCIMKGQWLSRRMKKINRNQCLV

SEQ ID NO: 3195 - protein, 313 aa, Auxenochlorella protothecoides
MVLLACRHAAVIAWDACKWREPPPEDAKIHKYVGIDPGRTKMFTTVDEHANVTSCSSKEFHSMSGSKRREKPLRSGTQRPQTSCPTHKTASTEVLLSRAVWIGPNLRRGLAWHMHGKPFRKLCHQAYVARERAINRLAEQFRGPPGMTTIYVPVCRGEEKLVDVWDTKRCVNKTCKVNIVNRDVNGAVNILMLTKCFFERGQSSNVGLLPPSDSDDSDSEDEKPKLKQNARVGELPSSSSDEDDSSSSSESEPEVEAPRQPRKRPEDEVDPAQIEADMARLRLIKEKREADRLKRIAEEGFDRYAPPGSDKAK

SEQ ID NO: 3196 - protein, 309 aa, Auxenochlorella protothecoides
MSGAKWREGVIANWHAKAPDYVKKLHQCPPYKTASTAVLLSRVVKIVPDLRRGLAWHRDGKPFRKLRHQAYVGRQRAITRLAEQFRAPPGMTTVVGVGNWSAQDRGGIMRGTPPGPWIRFLRRLRRVCRVVVVDEHRSSKLCCACHATLHAHQYVRVRNGEEKLVDVWDTKRCGNKACKVNVVNRDVNGAANMLMLTKPTRNPVATGATERESPDADEEGRANPETDSLSLLDTLVESIDPAQANPTPASGPTPKKTLAERLELAYNGEEGSELAALRKRQNARQQRMDEDQSGYLDHLANGWGARSSY

SEQ ID NO: 3197 - protein, 665 aa, Auxenochlorella protothecoides
MLVVGFAGELYNNRRDFAPVPWDLEAPATEEGPTEAELAAETAAIEAVINEWSTERAPAAARGDGDGTSGKVDEVLTTIKCTLNAFRGLPKPPRGRSSQDPLRPTLDNIVYTMAVTTILGGLLAELHVLRVVEEFERRKAAKCADADKVLHPLNNTFFCRCLRAVSGLRPEPDKKGSEETREAFPFLLETAAIFRRTCEEAVGSYQPPDLEHLHYFMDEAARDMETVTKTYYKREFFRRLKQNAQLELGCSARRAYSCARAVLAVEFVLARLNLEGCRLPPGKEAAIRACLLAKQKWHKKKKALCVHIGWAFFARLFDYRRFEHGRWTSGGHWRTNGYTVAVTLQRPRDPPRPGDPPPPPPKEAKAGKRNNAGASKGALHHQSREIANEHYRHGLPLTEAEIHMVVGMDPGRVAMFTAVDEHGNSTACGAKEFYAMAQHRQHEKTISGWLDKAPPCVQNLRKCPTFKTASIEALLRRVKAVVQNLQEGLAWMFKKPFRKLRHRAHLRREWAINRLAEQFRAPPGMTTVVGAGNWSAQDRGGVMRGHPPGPWMRFLKRLRRVCTVVVVDEFRSSKLCCACHTALHAHQYRRVHRGVLETGDVWGTKRCANRACAANVANRDVNAAVNMLMLVKLFLAGLPRPTAFGGPPPLTAPTNGWPTNYTNCA

SEQ ID NO: 3198 - protein, 417 aa, Auxenochlorella protothecoides
MDSGNRVHNGSAALLRHEGVEGIQKWLRVIFNKMGQDWMLSCVFIDASAAEYSAIRSAFPYWMPVHICSLHQSEAVASNASRPGKGHGQDFVASFKELQSMSFDLRKDSNQTAKQLGHRRVKGVSGYLQWTSKAKPDKDAMHRHIARLFSLLPYKQGLEAVHIPGTLTTLLALLQRHEKYNKDGIEKLTGLQLPTEREWNMYTAVEVLKVLNLEKDPPPDDARIDKYVGIDPGRTKMFTAVDEHANVTSCSSKEFHAMLGSKRREKTIGKWHAEAPDYVKELHKCPTHKTASTEVLLLRVAWIIPYQRRGLAWRIYKKPFRKQWHHAYVGRERAIPRQAEQFHAPPGMTTIVGVGNWSAQDGGGIMRGTPPRPWIRSLGRLRRVCRVVVVDEHRTFNCAAAVTPPCMPTSTNRSATA

SEQ ID NO: 3199 - protein, 499 aa, Phycomyces blakesleeanus
MSSTDGNPKSRVGCTPKTQFDCGGIIWLNRSGMKVPQISNLMKIPKSTVRDVIKRMEKTGTTELKPRTGRPKKIVEKYQSRPGLRIKKNIIGSSSSDTTSTTSSNTSKTNSKTDDEAQGKDWMYNTRPKKITRLKTNSTPFHSHSHSHLNPDSNQTQPNPTQPLKSQGKARRSKAKQGKASQARPGQARPGQVRSGQVRSFGLMTQCSWTSLTSGISMELQKQAHWASVMDEQSFLPGMIATEALVEFVQELVRKVDYTNKVVYVGALFVNFLFIKMPADGLLIPTIDQSLFASVFADSVQETVFQLEKTIQKKKEAPAQKQPADFINDIDKGCQIWAVDPGVCDIITAIDTSGRQRTTSVNEYYHLRGFNDAPHKYKNKFFLPASTDHTEAPVKTSIAFGDGVMNMEMYMLYEYLTSQVCNEFKKRNVENLVNSKSKRRVHAILQLQETTCNIVWNRDIMAVHNILDIFLFSSRNNNQRPDVSVRQTETNPGHQPSSV

SEQ ID NO: 3200 - protein, 228 aa, Phycomyces blakesleeanus
MYRPSFLDPGRKTVFTAAVGLDPNEHQLRHCTTKEYYHLTGSTLYARKLQQEKDTAGITAIESATPSAKTGRNIQFLRYADYMLPNMDTLFTFCDYNTAKYRFNLYQGKQRAPDMMVNILLSGSARYNRRRHFRKKNRKQERQNKKDKSKVPFVVFGNGMFGKDRVKLKGLRCSVAGDLLVLPIDEHPASKICKICKSRTLIDHPNVKGKFIVQKFILIRPEKETGIV

SEQ ID NO: 3201 - protein, 340 aa, Phycomyces blakesleeanus
MSYPARKRCPYKFSARNAFDKKVLLDKSFTGGILTEDIALESIFERPAPAGIATKIDLSTTILWRLDPGVRDAIVACVGAGAGAGQNRQSHIIRKTSTGEYYQLSGFKSATIKRARNDRVNVDERRLISNTLSTRTCNWDQFNEALRYTFWSFEATKGCYSTSLRNLRYHSYRNKQKTLDEMCKRLFTGSINLYLLGSILARSKDLLWVAFGAARFGGLGGNTAPPTKSFRAALLNYIKPTGRTQAHISKYVVMIEEYLTSQICPRCPTESISNQLDDLDVNIHSVPNCESCNTRCNRDHIAILNMRYVLLYMCLAGFLSTYITVQDTQYTHRISTVNIF

SEQ ID NO: 3202 - protein, 517 aa, Phycomyces blakesleeanus
MYEATKIHTAYIVNIKLMFGQHLRRVINILLDIKNKQRELTQQLHIQRATEERIKRMLTEHIFEPTRMFKEGVSTRRLEDVFIGEGYRTAFMEISPILTAYPKRYEFQKDSIYYDSKASPHNHFLALFRMVKLLEHLGRRSFNCFPLRRSWSPGYMQIDTRILSQGTIHTDGVGISIIRQNKDTTQGPNPRRATTINPENIPYIHDLSPEQHEIICGRCVLIDPGRRGLLYCMHEESTVKTPRCYRYTSNQKNIRLKRTKFRHILQDLKAQAPNVIAAEREISQTSGRANNTTNFAFHTSVKAANSSILSSFYTSTVSRTSKKPLFRKLRFSSYINQRKASERLAKDIRAKFGQDCVLVMVNWSAHHNRYHEHIKGVEMRNLLRKHGFNVCLIDEYATSRYCPRCYQPSLQTFKQVENPRPYRRSQMLTMTRHGLLRCTNLNCLENMDGSEVMHRLWNRDVAAVLNFRRILNNLRYDGTIPVRFTRVIRIGRIRRQAEEDLQEGRRLRQRLTRIQRK

SEQ ID NO: 3203 - protein, 739 aa, Phycomyces blakesleeanus
MWDGKKIINKLLDKVVLVLLRHHLARNRESKRISTTTTRNPSGKKDMRNHARYVCRAEDKKLKKLIQRKEKAGELEGEKWATKINSAKQRLANLRHTFKKKISQMLNDRKEASVEHKLVVQDLNITEEQQDFLEEEGTLDDDVPERRLNQLKSIIKHFVFRNDTPVCLEYVKRQSPETTTTEQSVCLLICNTLMKFLPPKKQYHVIAYQMYFCIFTNDVLKYARYTKFTRASCLSTSFSSSSALHLDSVTLYQLLTQNIDQEKSEEPSSHTNQQKKKGYSRMILYGYDRDELIGSQDKARQNKDATFNAVFDMREIQKACESYGLSFVHRITCLPGMKTVRLLGSRIKAHGTVTEETNQSYEARILINPSIIQEGRKTKDALFSELQNLTKEVKALESVHKRELDLLKDSNFQRKIKECKSNWGTTDDKDQLYRTIGKYKESRYKSYLTMAIRSKSKLHNVKDVPQYSRSPIEKCGKGVTKVEDRTVVNPGDFNYAGTDNGLVNMTASIPMSLQRMQFHLKLFNYYTALSKDSNEDKDSMRESESAPVASIDMAIRNFRAKYDQRRSLRDFYNSPKIINKKRHVEIQQHRYRHHLCRRERLELKHSENKLSSKKPLILFIGDRGTGTGSRIKGFRKYGGKWKQNINGEAVNVCITNECNTSQTCIFCFSPLTNPRIPGKKEEVTKSTKAPSFVSILGLSSVMFGAAPPPFYNLSQITAEHYTTIKSDFCTRRDDLAATL

SEQ ID NO: 3204 - protein, 252 aa, Phycomyces blakesleeanus
MHEESTVETPRCYRYTSNQQNIRLKKTKFRRILQDLKAQAPNVIAAEHEISQTSERSNNITDFAFHTSVKAANSSILSSFYTNTVSRTTQKPLFRKLRLSSYINKRKANERLAKYIRAKFGQDCVLTLSEMLPAVPSDRQVSPQPEPISPRPNTNCDTPWSPKANSTTTPFLSSFILTSTFRYTNLNCLKKTDGSEDRNRLWNRELTAVLNFWHILNRLRYNSIIPEKFTRVIQIGRIRRSSGGSSFETKTD

SEQ ID NO: 3205 - protein, 667 aa, Phycomyces blakesleeanus
MFKSFILKKKLSIINKNKSEENVDDPFKVVKSSRAKRSQSSDLKEDKQAVNKRVTVHRDLMNALIIYHQSPRCLQNNLGFPYKDLKRELPFDIAVNNEYKELPINKIIITSNDLRNIIFRAMMFINSYCLAFSRDSIPNSIYKQAFWYSKIKLRAKGNTKAFYSFIFISIIIGSRIELPQKKVTKSANVPPDLVQSWDTHRASITNSVYNQSLQSESRQFLSEACTELATCYTNYIVENFEKRLLSYLRYTLQNLLVFVCGGDPSWPSRAPSLEELQKSSIINTCRLLKSHLPDKVTLAALSAHPEKHISVFLQILSEYELEHTSHNPFDARWLPLPRLFGLFSKPSFHFRSDLEPNGKNQIMFGNLIRSNGFSIDCLFYKRSPTPIEVRNRTLQLELSDFEFNEVQNYYKPVFVDLGRKVVFAAAEGLSIKAHSLLRCTIREYYHMTGSTRYQADQLQQKRQNGVEAIESHIPSHKRASQAAYIERVQYILTHLDVLYNFYGSSTAKSQFFLYQRCQKVPEQTVNILIHEDSKYSQKRRKKKAKKKKQEEPTNPKTLKPTSRQNEYNTSKTCNNCQAKNLESADHTRGPSVLVCKACNTLWLRAVNAAKYMMTVALSTWRGTHRPTASQISDKSKQTSSNYHNNPIIVPKLACLFEPFRQIDRLSE

SEQ ID NO: 3206 - protein, 292 aa, Phycomyces blakesleeanus
MKGIYWSLFDMDCIGFMSRSGFDGKSLSDKNFTSAVCTVDTALELIYERPVRAAKDSLALVGIATKIDLSTATIYRLDPGVHDVSVACDSLRTGGGQNRKRYRIRKASTGNTYARGLIYNTLSTRKCSWNRFNEALRYILRNFKTIKGYYSTGFRELRYHCYRNKKKALDKMCKRLFTGSREYREKEVPRCNNNGEAKRPTLVASGTARLSELYGSIARSTKRFRATLLNYIESTRHNQAHAAKCVVMIDEYLASQIYSGCHIKKSVLFYVKPIASMTQLIYVLHSSKTLRT

SEQ ID NO: 3207 - protein, 1121 aa, Phycomyces blakesleeanus
MSLYTTKYRQSYFPEPERIQQVQHKLGVDRPKIQEKRIIECVEKKTPQETFYQGVNTLPPSFLQSNTKRTLSESFSEESFNKKNRVEGPVKDLEECFFTSMRDRVEELVKQTKTQDKTNELKNKLLNVKTLPAAIITNAAQLAKCDRKVMRSHMEHRPGLKDVEEWKKFVSQNFDKIAEAVVGSVVKDTAKVYSSSTPTNKQPYEKMRTCTVQINSLFRSDLPPIVKTFVCTRLQDSMVTSTDYTLCFSALVNMIISELRTSEFFFDNNDINIKKVPGFNLAKLLSFVTTNEPKQTIQPLDKDLIASKRFDTDFKCLFTSQHLQVVHSYFFGARGAKEENLNSHPVQNSLFCSFKESGLDKQSFCLEKASSSAMLMALETYLVNFENMWDGKKIINKLLDKVVLVLLRHHLARNRDSKRISTTTTRNPHEKKDIRNHARYVCCAEDKKWKKLVQRKEKAGGLEREKLATKINSAKQRLANLRHTFKKKISQMLNDRKEASVEHKLVVQDLNIAEEQQDFLEEEGTLDGDVPERRLNQLKSIIKHLVFSNDTPVYLEDAKHQSPEATTTEKSVCLLICNTLMKFLPPKKQYHVIAYQMYFCIFANDVLKYARYTKFTRALYPSTLFSSLSALHLDSVALYQLLTQNIDQEKLEEPSSHTNQQEKKGYSRMIFYGYNRDELIGSQDKARQNKDATFNAVFDMGEIQKACESYGLSFAHRMTCLPGIKTVRLLGSKIKTRGTVKEGTKQSYEARILRNPSIMQEGRKTKDILFSELQSLTEEVKTLESVRKRELDLLKDSNFQRKIKEYSRSPIEKCDKGVTKAEDRTVVNPGYFNYAGTDNGLVNMTTSIPMSLQRMKFHLKFFNYYTALRKVSNEDSIGLNLSKEEESFLHLPSVTNTKTSDVDVRSIEDSMREMESTPITSIGMTIKNVRDKCEQRRRLRNFYNSPKIINQKRHVEIQHRYRHHLCRRERLKLKHSENKSSSKKPLILFIGYRETGAGSRINGFRKYGGKWKQKIHGEAVTVYITNECKTSQTCIFCFSLLTNPRILGEKEGSYKVNKGIFLCINPRCITVKNRCASKPRDGLSALAIALVGLSSVMFGAALPPFYNVSQITAKHYTKNNI

SEQ ID NO: 3208 - protein, 469 aa, Phycomyces blakesleeanus
MSGKVLQTTPWWNPTQKHFVALDFELTGKLKELYNLFTGQKHKDTPDELRVKKAVRVSRTNEPDEAHILIVYKSCKARGNSTKRSPVYPNHDMTLLQLLNRDLGPHQRYTLSITLSSFILNNVHVQRARDRIVLQSSFLREVVVLYGRLTIVEFQHHYPRLQHLQTLYTELIQTNEVNLTVNLNGLKNYGAVVSSACKTIAITYNNYYNEFQDGYMFRVSFARRTAIDHLNYVELTTNDFNIQEIAENCRVCTVDPGRRDAFKAYYGDDGIRCLTRKEYYSASGSVKRMINEDARKVAQGIKEVGTYIPSVKTTSGEQFLRLTQYIIANMPTLFNFYNFRVAEIYWKKIRGRQKALDNCANILIHGCIKNSHQRVFITGNVSKMPLIVFGNGLTNKSSVRFHSLWHGVSEKKLQQSSFVFVMFNVDFEIWSGNGKPEMFNPQPSSRTTRTTATQSATMNVVAPHSGGRT

SEQ ID NO: 3209 - protein, 513 aa, Phycomyces blakesleeanus
MNEATPFRVLTVKASIKATGWNPELLRPLQVLVAKLHTIVTHTFALSKHIFLAELALDPFFDLNGQINQPFFVEVFLSLIDRNTDSSRITEITRLNCELISRHINTYIHNISYARISLLNAHQIAMYEATKIHTTYIVNIKLRFGQHLCRVINILLDIKNRQRELTQQLRSQRATEERIKRMLTEHIFEPARIFKEGVSTHRLEDVFIDFRDQQNGVIKFRGTIQTDGVGISIIKQNKDTPKGPNPRRATTINPENFPYIHDLPPEQHKRIRGRCVLINHGRRDLLYCMRSLRIRLKRTKFRRILQDTKAQTPNVIAVEHEISQTSGRSNNITDFAFHTSIKAANSSIISSFYTNTVSCISQKPLFCKLRLSSYINRRKANERLVKYIRAKFGQDCVLVMGNWSAPHNRYHEPIKVLFRCTNLNCLENMDGSEVMHRLCNWDVAAVLNFRHILNNLRYDGTISVRFICVIQITPESRPTPIVFFSKVSWEYLVGTTVGSSSSSSSYFYFGVYT

SEQ ID NO: 3210 - protein, 878 aa, Phycomyces blakesleeanus
MRRKKTPQGTFYQGVNTLPPSCLQNNTKRTLSESFSEESVNKRNRVEGPVKDLEECFFNSMRDRVEELVKQTKTQDKTKELKNKLLNVKTLLAAIITNAAQLAKCDRKNGRSSYLKTNKIAEAAVGSVVKDTAKGYSSATPTNKQPYEEMRTCTVQMNSLFRSDLSPIVKTFVCIRLQDTMVRASSAEDKEKGLSFIFKVNLIELLGGQTLAKSLNLICSEDALRQMLNDRKEASVEHRLVVQDLNIVEEQQDFLEEEGTLDDDVPERRLNQPKSIIKHLVFSNDTPVYLEDFLPPKKQYHVIAYQMYFCIFANDVLKYALYTKFTRALCPSRSFSSSSALHLDSVALYQLLTQNIDQEKSEEPSLHTNQQEKKGYSRMILYGYNRDELIGSQEKVRQNKDAIFNAVFDIGEIQKACESYGLSFAHRITCLPGMKTVRLLGSRIKTHGSVTEETDQSYEARILRNPNVIQEGQKTKDVLFSELQSLTEVKALESVCKIELDLLKDSNFQRKIKECKSNWGTTDDKDQLYRTIEKYKESRYKSYLTVNKIRNELAEKRQQLYFRQMKIRFKSKLYNVKDVPQDSRGQIEKCGKGVTKVEDRTVVNPGDFNYAGTDNGLVNMPTSIPMSLQRMRFHLKLFNYYTALSKDSNEDKRKKYTDEGEKVQLIEDSMRELESAPVASNDMAIGKFRAKYDQRQSLRDFYNSPKIINKKRHVEIQQYRYRHLLCRRERLELKHSERTGAGSRVKGFGKYGGKWKQNIHGEAVNVCITNECKTSRTCIFCFSPLTNPRIPGKKKRSYKVNKGTFLCINPRCITVNNRCASKPRDGLSALAIALVGLSSVIFGAAPPPFYNVSQITAEHYTKITSDFCTRRDDFAATL

SEQ ID NO: 3211 - protein, 280 aa, Phycomyces blakesleeanus
MVYHQPDTCKCRTPYAQSRLFFRCLHFLSEEVHKKVYITENIPSKVASKGYIYRKLQDVQFVHALGRKKLRSLQEQTFAQNKAIQVDMQAFWNLVKTSGVAGYPADYIDDIDKDCQVWAIDPGVCDIITTVDTSGRQRTTSVNEYYHLCGFNDHENKYFPPAPADHTEAPLKTIIDFGDEDLKTKCSKNMMYMLDEYLTSQVCNESKKINLENLVNSNLKRRVYTILQCQETTCNIVWNRNIMATQNLLGILFSARNNNQRRDVFVCQPKTNHGHQYSSV

SEQ ID NO: 3212 - protein, 1145 aa, Phycomyces blakesleeanus
MRRKKTPQETFYQGVNTLPPSFLQSNTKRTLSESFSEESFNKRNRVEGPVKDLEECFFTSMRDRVEELVKQTKTQDKTNELKNKLLNVKTLPAAIITNAAQLAKCDRKVMRSHMEHRPGLKNIEEWKKFVSQNFDKIAEAAVGSVVKDTAKVYSSSTPTNKQPYEEMRTCTVQINSLFRSDLPPIVKTFVCTRLQDSMVTSTDHTLCFSALVNMIISELKTSEFFFDNNDIKIKKVPGFNLAKLLPFVTINEPKQTIQPLDKDLIASKRFETDFKCLFTSQHLQVVHSYFFGARGAKEENLNAHPVQNSLFCSFKESGLDKQSFYLEKASSSAMSMALEMYLVNFENMWDGKKIINKLLDKVVLVLLRHHLARNRESKRISTTTTRNPPGKKDIRNHARYVCRAEDKKLKKLVQRKEKASGLEEEKWATKINSAKQRLANLRHTFKKKISQMLNDRKEASVEHKLVVQDLNIAEEQQDFLEEEGTLDDDVPERRLNQLKSVIKHLVFSNDTPVYLEDVKHQSPEATTTEQSVCLLICNTLMKFLPRKNALHLDSVALYQLLTQNIDQEKSEEPPSHTNQQEKKGYSRMILYGYNRDELIGSQDKARQNKDATFNAVFDMGEIQKACESYGLSFAHRMTCLPGMKTVQLLGSKIKTHGTVKEGTKKSYEARILRNPSIMQEGRKTKDVLFSEFQSLTEEVKTLESVRKRELNLLKDSNFQRKIKECKSNWGTTDDKDQLYRTIEKYKESRYKSYLMVKKIRNELAEKRQQLYFRQMAIRSKSKLHNVKDVPHDSRSPIEKCGKGVTKAEDRTVVNPGDFNYAGTDNGLVNMTTSIPMSLQRMKFHIKLFNYYTALSKVSNKDSIGLNLSKEEESFLHLPSVTNTKASDVDVGCGYFRQRKYLERRKKYTDEGKKVQLIEDSMKEMESAPVTSIDMAIGNFRAKYDQRRSLWDFYNSPKIINQKRHVEIQQHRYRHHLCRRERLELKHSENKSSSKKPLILFIGDRGTGSGSRIKGFRKYGGKWKQKIHEEAVNVCITNECKTSQTCIFCFSPLTNPRIPGKKERSYKVNKDTFLCINPLCITVKNRCASKPRDALSALAIGLVGLSSVMFGAAPPPFYNVSQINAEHYTKITSDFCTRRDDLAATL

SEQ ID NO: 3213 - protein, 1186 aa, Phycomyces blakesleeanus
MRRKKTPQETFYQGVNTLPPSFLQSNTKRTLSESFSEESFNKRNRVEGPVKDLEECFFTSMRGRVEELVKQTKTQDKTSELKNKLLNVKILPAAIITNAAQLAKCDRKVMRSHMEHRPGLKNVEEWKKFVSQNFDKIAEAAVGSVVKDTAKVYSSSTPTNKQPYEEMRTCTVQINSLFRSDLLPIVKTFVCTRLQDSMVTSTDYTLCFSALVNMMISELKTSEFFFDNNDIKIKKVPGFNLAKLLPFVTTNEPKQTIQPMDKDLIASKRFETDSKCLFTSQHLQVVYSYFFGARGAKEENLNAHPVQNSLFCSFKESGLDKQSFYLEKASSSAMSMALEMYLVNFENMWDGKKIINKLLDKVILVLLRHHLARNRESKRISTTTTRNPPGKKDIRNHARYVCRAEDKKLKKLVQRKEKASGLEGEKWATKINSAKQRLANLRHTFKKNISQMLNDRKEASVEHKLVVQDLNITEEQQDFLEEEGTLDDDVPERRLNQLKSVIKHLVFSNDTPVYLEDIKHQSPEATTTEQSVCLLICNTLMKFLPPKKQYHVIAYQMYFCIFANDVLKYARYTKFTRALCPSTSFSSLSALHLDSIALYQLLTQNIDQEKSEEPSSHTNQQEKKGYSRMILYGYNRDELIGSQDKARQNKDATFNAVFDIGEIQKACKSYGLSFAHRMTCLPGMKTVRLLGSKIKTHGTVKEETKQSYEARILRNPSIIQEGRKTKDVLFSELQSLTEEVKMLESVRKRELDLLKDSNFQRKIKECKSNWGTTDDKDQLYQTIEKYKESRYKSYLMVNKIRNELAEKRQQLYFRQMAIRFKSKLHNVKDVPHDSRSPIEKCGKGVTKAEDRTVVNPGDFNYAGTDNGLVNMTTSIPMSLQRMKFHLKLFNYYTALSKVSNEDSIGLNLSKEEESFLHLPSVTNTKASDVDVGCGYFRQRKYLERRKKYTDEGKKVQLIENSLREMESAPVTSIDMAIGNFRAKYDQRRSLRDFYNSPKIINQKRHVEIQQHRYRHHLCRRERLELKHSENKSSSKKPLILFIGDRGTDSGSRIKGFRKYGGKWKQKIHGEAVNVCIINECKTSQTCIFCFSPLTNPRIPGKKEGSYKVNKGTFLCINPRCITAKNRCASKPRDALSALAIGLVGLSSVMFGAAPPPFYNVSRINAEHYTKITSDFCTRRDDLAATL

SEQ ID NO: 3214 - protein, 236 aa, Phycomyces blakesleeanus
MKEYYTNEDTPTEEDQRISGLLPFKKIKYQSLINHLQGDKGLVKNIWRKFSNDAVLILGNWSAGQSKYHGPIRGIEMSRMLAKECFQIYLIDGFKNSSLCPACQNGELETFKKTQKPRPFQRRKYPTVDWHNHLSHICMYMNTLIIYTISTQVQKQQFLKPVAESTRDTTQSSLYRLWNCDMAATLNFRHIIFNLHKNRRRPKRFCRLSARSFTTLKRKEALFSSSRTVKKANYSV

SEQ ID NO: 3215 - protein, 254 aa, Phycomyces blakesleeanus
MSLYNSVYLGHGRKTVYTAVCGFDKDIHLIIRCSTKEYYHYTWSAKFLADQQKLKKENGIDKSAEANRYYDYVKYMLEHIDSLFDFYNVSSGKKWLTLYQNQYSRDGMFGKDSVKLKGNLCGVTGILWKTLNNRERDGRLIAVTIDKYNYSNNRSSCHLKKLKPLEHICGHSILEFISCRISWQRDINASKNMMTISLRLGEELVDRPLSKDLKKNSNNNSETSTTPPHYCIMNSLSLSRDLDNYRFLTCLNLK

SEQ ID NO: 3216 - protein, 525 aa, Phycomyces blakesleeanus
MATYTYFINKPFFMEVFLSLVERQVRDGIKSGNGKSKMKDETLRYRDFIMKHKEACCEHAGYVPPKLTHAKQSADYESTRIPTAYINNIKAHFARKQLPRGDFLDENQRSLVASILAIYPESYTLLKSSIYYDVQAIPLNHMKAFCKLGQLLKPLPFDKKALKKQKVDKSLFFQEMMLTNGVSVTILKQNFESGRCQKTDAAVTSGESSTNTGRKIKRTKTINEDSFTNNYDKQFSIISIYKKSKKQEITTVKVFNKQFEARVYPIEKTGDIYYGKHLMFIKRLRDARPGIAKLDAYIYYLTLLLSTKHIARRLASQKEQLSEGVNAKQVQVKQGPHVIVPKLLVLPFRQMKFISNINYDRCDSRLAEDLRIFFEKDPVFVFGDWSAPNVKFQEPSRNKDILKYLEKSRFSIYMINEYKTSSCCSICPTGEMENFKKNANPRPLQREKFPNVLCHGLLRCKNKACLVNGKGRLFNRDTAAAINFRLILNSLREEDRRPPRFIRTSKVLFSGLGIIQNYVIKKSFI

SEQ ID NO: 3217 - protein, 445 aa, Phycomyces blakesleeanus
MQTGYYSLLLNGTLFLHNSIDSTLLKAPGVVHWDIDNISFYSTCLLIKTILSLKVLIKSSLPYHKYNNKAYMKANKIRNELDKISPQLIFRQMIIRFKSKLDSVKELPLDSGNPIKECGKGVSKAKDRTILNPDKFSYEGTDNVLVNITTSIPMSLPRMVFHLKLFGHYTALSTHSNEDNISLRLSKEEETFLRFSSVTNMKASDVDVSRGCFRQRRYLERLKKHTDGGKEVQSIEDSTRKMASTPVTFSAMVIENLHEQYKQRRKLRDFYNSAKMINQKRHVEIQQHRYCHRLFRRKRLKPKHSDSKFSSKKSLLFFTGDRGTGTIFRPKGFRMYGGKWKQKIHRETANVCITNECKTSQTCIFSFSSLINPRIPGKKEGSYKGNKGTFLCINSRCITVKKQWAMPVHFLRGSKGAHSQAYLLHRFRVFKADRLPSNRLFLRSI

SEQ ID NO: 3218 - protein, 287 aa, Phycomyces blakesleeanus
MVLQSFRNKYEKRRRRRDFYNSPKIISQKRLVEIQQHRYWHHLCWRERLELENLENKSSSKKPLILFIGDQGTGAGFQIKAFRKCSGKWKQNIHGEAVNICITNECKTSQSCILCFSPLTSPRIPGKKEGSYKVNKGTFLCINLRCITVKNRCSSSPRDALLALAIALVGLGSVIFGAAPSPFYNVSQITAEIIQKLHLTSVHEETAWQLRCSFRAPSTIRNYSWKYNSGSSYVKFDEGVQEFLETLFIRGTSGNVQLPSFDDRPVFVDPSSGILKYGNETYHMVRF

SEQ ID NO: 3219 - protein, 689 aa, Rhizopus microsporus
MDIAADTNPAAAQIVLTLDDDDVQESTDITRRRMNKLRTITRQIIFKQFGHIITERHLKNVLPDIQPNELQACVMIANFLMPYLPTATDSHSVAQQLPFFLMANDLFQCTGYTKFIEKLVPMTSPTRLLALQINAPQIYSLFSSSMDIHDFNGDVITSRQIATESKDAVFSSFFDIDKINSLCASYGLKFAHNIHALPGLKTVRINGYLRNQTPSRLATPLSDTRSIKRNYEAFERKMPDRRMIQQAEVDALQRQLKKINSERREFMLRNNIRDLKKQWIRSTDRRLIAADIEQNNRLYQKIQQTKASRDAINERLIDTKQQLSDARRKIYNSINQTTSYGSNNNQLPRVENFKLDDTQSDLTNFAFSGTDNGIVTMTETAKLSLDQFKFHLKLYNRYSALTEDTTRFQASAEEATFFRFAKPFKVHASDIAYGSGAIKLRAKLQGAKKTKAKVISEIEAKLSECSFQEIHNIEELNNWYNGRITHQDVLRDFYYSRQRVRQLRTYELQKRKYIDRLCSQERSYVASSSKKPSVMFIGDSELCFGSSIKGYQRYGGHWKPIKHSFYTSVCIISEYNTSQTCIFCFKKLLHPKRSTADKNGRINLKNVNGAFICVNPSCPSVKAGQNTHARDALSAVAIGLSGMATLLLGRTFPQFNRNISPSQTDQFNQLAAAFCTGNAVKPITAGNNT

SEQ ID NO: 3220 - protein, 433 aa, Rhizopus microsporus
MPTANNDMSVEAVLHAPTPSTSRTSAPIKAYKKYIKVVDHITQLVYAGSIFINYYVLELLEDGEELFMMAQNLFYSMFSIFDGQGKHASNSIKKSFKAFCESTSLTQPDLYKRASKGYMTIASSMAKQYETLIHNYKEMEQKKLSQETKPQGKAPSSYVHRKSQELPFVKKLNTSKYRSLKENTLTAINSNKPLEITSKLKNIDKKDIDAVQSFIKAVQARIQDKTFMPLKYTDPQGLRNVIITDGYAVFFMFKRAASIQGEPRREPKAPKGFTDIADDAEIWDVDPEHYHLCGYSLATRRRKEHQECHLDEFRYISELPTLKIANLTSFFLATSTRLQNYQRIHNYYCQDKWSQKLKFKVYINKQKGTQEIVKRLFENSKKYGTSSTVGAKNQNPNKSKHEPLPSADLPSSSQWKRIVALEDGPFCSSMKSK

SEQ ID NO: 3221 - protein, 269 aa, Rhizopus microsporus
RRDILYCVHKNPAPEQPQGETRKTKKYRRILQGLKAQDPAAVQAEQALYQQPSSTMFVEDLGRFLQAISEHSAVLSRFYGHTITSHDNGYPFFRKIRLSAYFNKQRADRKLIQDLRAKFGEDAVFMMGNWSAPHGRYHEPICDLGFGRLFKKHDRCCPTCHNESLHTFRRIPYPRPYQRERYPTVVCHGLLKCTDLYCRPAMAAPDRYRLWNRDVAAYLIYLRILRGLRHGMVPHRFRRVAVAPTRHRRRVDDQEQPKVRARLDDDSPS

SEQ ID NO: 3222 - protein, 246 aa, Rhizopus microsporus
MLYFVHESSTPEQPTWKTKKYRRILQGLKVQNPDTFQVEQALCQQPSSTVSSAVLSQFYGHTITNHDNGYLLFRKIRLSAYFNKQYAVFVMGNWSAPHARYHEPICSLGFRRLLKKHRFQIYLIDEYKTSKCCPTCHKESLHTFRRVPNLRPYQCERYPSVVCHGILRCTNLYGRPAMAAPDRYRLRNRDVTACLNYVHILRGFRLNGMIPHRFRRVAVAPTRCRRRVDDQEQPRTRIRLDDDSSS

SEQ ID NO: 3223 - protein, 516 aa, Rhizopus microsporus
MYVKPQCHMKWLHFIQKEMKQKKLVQEMKPQDKTSSSYVHRKLQVFPFVKKLNTSKYRSLKENTLTAINSKKALEITSKLRNIDKKDIDAVQNFIKTVQARIQAKTFMPLKYTGLRGSKYFSLLPLYKIASKSIQIDAQAFWRLAKQCDNKIKPGQKDDNDLTLWYFNVFEFSKIGYKTLNSLTSRPKKFANAIITDGYAVSFKFKKDVAIQDEPRREPKTPKDFADIADDAEIWTVDPGISTIFTVDSTEHERIRTTSLEEYYHLCDCNLATRRRKEHQKCHLDEFKYISELLTLKTANLTSFLLAASTRLQNYQRIHNYCCQGKWPQRLKFKTYINKQKETQAIVKRLFDNSKKYDKSSTVGAKNQNKSKHVPLPPADLPSFSQRKRIIAFGNGSFGSNMKGKRAAPIRRITEEIKRKFKQSNEGTEFVSVDEYLTSQICNKCKSKQLNNISITGSKRRLHSVPKCESYGTVWNRDVNSVLNIYGIFVYKSEHDNEIPLSSKRLAVLLDLMRYL

SEQ ID NO: 3224 - protein, 236 aa, Rhizopus microsporus
MLYCQPVKFRYTKQQQDKTWKTKKYSRLFSTVSVEDFGRFLQARSEQSAIRLSAYFNKQRADQKLIQGLRVKFEEDAVFVMGNWSAPHARYHELIRGLGFRRLLKKHMFQVYLIDEYKASRCCPTCHNESLHTFRCVPNPQPYQCERYPAVACHGLLRCANLYCRPAIAAPDRYRLWNRDVAACLNYVHILRELRLNGMIPHKFCRVSVAPTRCRRRVDDQEQSRTRIRLDDDSSC

SEQ ID NO: 3225 - protein, 339 aa, Rhizopus microsporus
MFANTVKSDGFSVDFVFNKRTTKDTSLIANIDLKLEDFGLEEAKQAYQPMFLDPGRKSVFTAAIGLDTANHQIRRCSTAEYYHRTGSTKYIKKLERFKAQKGIKTIETNISSPKTSQCAAYLLYIEYILTHVGVLFTFYDYKTAKDRFYLYQCRQRAAEEMVNMLVHGGAKYNKNKRKKRNRKKKEARRGKNRRQIQKKKRNKLPKTGISQKWKPAKFQTEREKVPLVVFGAGMFGKDSIKLNGNRCGATGVFWRALKRRETAGDLIAVTIDEYKTSKVCNACNNDPLTSMSGLKGCSVQICSICKTLWQRDINACKNMLSIPLSIWDGRGRPFQQSRN

SEQ ID NO: 3226 - protein, 220 aa, Rhizopus microsporus
MEGFIRFLQARSEQFAVLSQFYGHTITNHDNGYPLFRKIRLSAYFNKQRADQRLIQDLHAKFGEDAVFVMGNWSAPHARYHEPIRGLGFRRLLKKHGFQVFLIGEYKASRRCPTCHNESLRTFRRVPNPRPYQRERYPTAICHDAPYCRPAMAAPDRYRLWNRDVAACLNYMHILRELRRNDIVPHRFHRVAVAPTRRRRRVDDQEQPRTRIRLDDDSPS

SEQ ID NO: 3227 - protein, 219 aa, Rhizopus microsporus
QPSSTVSMEGFIRFLQARSEQFAVLSQFYGHTITNHDNGFPLFRKIRLSAYFNKQRADQRLIQDLHAKFGEDAVFVMGNWSAPHARYHEPIRGLGFRRLLKKHGFQVFLIDEYKASRRCPTCHNESLRTFRCVPNPRPYQRERYPTAICHGLLRCTNLYCRPAMAALDRYRLWNRDVAACLNYMHILRELRRNGIVPHRFRRVAVAPTKRRRRVDDQEQ

SEQ ID NO: 3228 - protein, 560 aa, Rhizopus microsporus
MQVLIISSSKILGIYKDVFNNDIFESISDYTYAKNNSAKLVRFSAELLKEVISKPELKIKTWHVMPRPSNNMLFVPLSGAHAMHGVLERCFNAGLKISQQVYTEEYSFEERRLCALLTVAVTQYIPALMGPTSFEDHYGDVVWKNHLWETLFNLDHIQKKRSSASQGSQPCARLNYGWKTDGHIVIILFIKKAIEQIPQDDSEMNFMKRKVNLTIWRKGLYPLKKEPTGIMLNDRIIGQNPGLRDIFAATDCSASEIVDKDTVKEKTTKFSNAEYKMRSGFECEIPTVGSVNSNELLKYLRVIGRNREKIFDFMKGYRHRETKAYLVQNRKATDNHMCDLVLGQTAAGAPYTLAHRTSSKKRRKAKNMFKKASGIVAKETKRTVIAYGDASLTGTKAGYTLIPVKKVQRALAQRALVIPVDEFRTSVNCSKCHRRLENKYERQKLVCNHKKKKVRLRGEKKMLLYDVWTMTRGLFVVHRSAHKENPAVSYPPVMYQLKHCHLCPAVNDRDIVWQRDVNAALNIRSILMSYIESNYSILSRHPSLKREPTSGGYQATSQPL

SEQ ID NO: 3229 - protein, 275 aa, Rhizopus microsporus
MLYFVHENSTPEQPVKFQYTKQQQIKMWKTKKYRRILQDLKAQDPDVVQAEQALSQQPSSTVSVEDFGRFLQARSEQSAVLSRFYGHTITNYDNGYPLFRKVRLSAYFNKQRADQRLIQDLRAKFGEDAVFVMGNWSAPHARYHEPIRGLGFRRLLKKHGFQVFLIDEYKASRCCPTCHNESLHTFRRVPNPRPYQRERYPTAICHGLLRCTNLYCRPAMAALDRYRLWNRDVAACLNYMHILRELRRNGMVPHRFRRVAVAPTRRRRRVDDQEQ

SEQ ID NO: 3230 - protein, 512 aa, Rhizopus microsporus
MYFQYCSYEPMDLKYVQQIASYEVTKINTAYLSGVSSHFGNKLRMFLNMTLKKDERIKAVKNKMKKNSGPEEEASAIVKTIVEQCNKVKSKCLEAFKSILKTIKAFILPYVAIGTLILSTQILKNPITSHLDKEIIWVSVLNVAAKAMKPQNERKTMKLRGMLFTEGVGVSVLKQNDNMKKGGSGTGRRTKAVDEEDFKYVEKLEKEVLLAGIGKCVLTDPGRRDMLYCMHEESTIENRRTYRYTSNQRIIETKTRKFKKLRENLKPDNVRAVEVSLSNCKSSTVNVGKFAKYLQKRATVTPVLSKYYANEDIPAVDANLLPFRKMKPPSFINGQQADKRLTRNLITKLGDDATLIIGNWSTGNVKFHEPIRGTGMRRMLAKQGFKICLLDECKISSLFPSCLSGKLEKFKKVQNSRPFQREKQPTVTCHGTLRCKNQQCLEDTTGTISRRRLWNRDMVATLNFRHILFGLRENGKRPERFCRHNAPPSTSFKRKAISSAISRPTKKTTNPL

SEQ ID NO: 3231 - protein, 289 aa, Rhizopus microsporus
MKIDNGLLKLGKITFSGTDNGHATMTETVGFDMKRFKFHLDLYNKCFALENMSEERNVDADIIDRAVININTLNHYVSEQETSESTIQMSPYMQLPKPYKVHASEVDYKNGAQKYIKQLELAKNTTDIGRQVVEAEVLLSKVDTTSARKLEHLNELHNTYIEHKHIIRNFYYLSSRLKQKRAYELQKRKYTDRLCSDERRYATFSRKVKPIMFVGDRGLGIGSRIKGYMRYGGYWKPLKHSLYTYVCITNEHNTSQTCSYCFQKLSHPVQTVYKNGCKTITNSQWHIWL

SEQ ID NO: 3232 - protein, 659 aa, Rhizopus microsporus
MTEENSDDDFQSTITRKRKGRKPTPVNSSQKQMKKGKEKSSSSSSTAIVESKSSDDAPLTKPTAATAKYNTVSDSNNSSANANIVKKCAIAVKATVKPIWKPNYTQALHELELEEDFNFDLSDYIRKEFFVEIFLSPIVRNNISGRLLGKTANYRSLVSKHKESYCLSASYTPIVLVNAQQIALYECTKVQTAYLNNIKAHFGNRLRAILNKVCKTKELAADLRKDLKKKNVDKRAVNKALREEVYGPCNQNKTAPKMDNKFQNWGSVVNTNNKAFKDQGMNISLCFQDTIETDGVGASIIKQNTTINRKMAQPKTKYKESEDVARYMESLIQEELNEAKSMCVLMDSERRDLLHCMETSTAQNKQVMVYTKMTRTKVSSHYRILQKKTKPASVKSSEAKLAKTKSSSVKIEEYETYIKTRASVEKPICTLDICSLARIRGYFPQPNESTGIDMHATYLELMIKQRHISERLDNGGKAKLLGIVAKMSKESSDQDSLKQQASQILEKLQVLPFRKMKFSSKLYYDQDDLMLVKKLKQKFGSDAVLVLGNWPAPDTKYQELTRNKGLIQMLKEDGSVVFLIDEFRTSSFCPLCEGRLENFKTLRNPRPYKKKTRPTVLCHGLQRYWAIRCIFSGCLEQLKPKLWNRDLAAVLNFKKILTC

SEQ ID NO: 3233 - protein, 761 aa, Rhizopus microsporus
MPAEEAAETAASPLSAFKRILTIKTSLSTIGWKEQYKPALKELMNITRDGSVTGKSQLSDKTRMARSLTFPYTEKYCQHASYTPIKLTNAQQITKYEGTKIHTAYINNITLHFGNQLYMEERGCSEEEIKKTIKTDVLDVCHKLKMEISAKKLPTLTANFLTETITNQIQSFLNVYPDKYNFAKNSIYYDVKAKPQQHLQAYYMLAKICEENNSKSFSCFPLRKGFIPGYMTIDAKILNYHILKNKKFAVGSKFDIWKSVGTIETDGVGVSIVKQNFDPARKGASSDRWRMITTDDSFVYAGNLSKSELLKTKDKCILIDPGRGDLLHCIHETSSPEKKSIFRYKRNQRAVEMKSRRYRKLRQILKPDYIQSLEDQLSRLPASTVKSKVFAEYLEVKAQISECLKEYYCNEDVIFGTSNCDAINDGNASDNISYADAASSKVIIGEASRSNVDSIDGIANDGEANCASDSADVISDGAVSDEAVSDFNVDDKFDTELAIHQVKRCLKRSIDNLQFILNENKTKNKIEKHEYEWFNSILKEAQFLKVISKEEYEYHHKRAKDLSELIRSTLTPLPFRKLKLSSKINKQQSNKKLANDLKKKFGKDAVLILGDWMVNYVEFHEPIREKGMRLMLRKEGFTALLINEYKTSSFCPECEIGELETFKIMPTVKRHGLLRCKNQNCLKIQQTSRLWNRDLAAVLNFRSILQSLRKTGARPERFTRYTMEDNRRKRKGTQHESNKTKKPDLIPPRLLLKAPTVQINY

SEQ ID NO: 3234 - protein, 276 aa, Rhizopus microsporus
MKPQSERKTTKFRGMLFTDGIDVSVLKQNDDTKKGGSGAGRRTKAVDEEDFKYVEKLEKEELLAGVGNCALIDPGRCNMLYCMHEESIIESKRTYRYTSNQRAIETKSRKFKKLRESLKPDDVRAAEVSLSKYKSSTVNGDKFAKYLQERATITPVLSKYYANEDIPAVETNLLPFRKMKLSSFINGQQADKRLARNLKTKFGDNATLIIDNWSAGNVKFHESIRGVGMRRVLAKQGFKICLLDECKTSSFCPSCLSGELGKFKIQDLSREKSNQL

SEQ ID NO: 3235 - protein, 277 aa, Rhizopus microsporus
DILRCVYENSTPEQLVKFRYTKKQQDKTWKTKKYRRILQDLKAQDPDVVQAEQALSQQPSSTVSVEDFGRFLQARSEQSAVLSRFYGHTITNHDNGYPLFRKIRLSAYFNKQRADQKLIQDLRTKFGEDAVFVMGNWSAPHARLPKEHGLQVYLIDEYKTSRYCPTCHNESLHTFRRVPNPRPYQRERYPTVVCHGLLRCTNLYCRPAMAAPDRYRLWNRDVAACLNYMHILRKLRRNGMVPHGFRRVAVAPTRRRRRVGDQEQPRTRIRLDDDSPS

SEQ ID NO: 3236 - protein, 633 aa, Rhizopus microsporus
MKRHSTSSSSERPSKGAKLNECTVASAQEADYSSTVNQEGASSSSSEPEPSKKVQQKIDKKSSAPLCGLTAHARSTSNQCPDKKAIMPVCNSDERVENFHIKDLADYTTKVLFMGPLFANFIFIKLLDDGQAIPIIEQSLFTNIFAGRKPNDLTDFYYQLFNFTKLGFRTRDNLPSGKKFRNVITTEDHSVSFLFTRTVKRSLATTKNPSDFIDDIRNGCDVWGIDPGVSTILTSVDTSGRQSTTSLDEYYHLCGYNNANFIRKKHQEQHTAQFLKISNLSSLKTSNVTEFAKACKTGSVCMMILQDTQAKFCRSSKLKFQCYIRKQKGVHEICKRLMHGSMKYNKKTSTGAKTPSAENESKYCPPAPLDHPDKPRKTIITFGDDMFNSSLRGNRGASVRLIKKALQKYCGNQLEICMVDEYLTSQICNRCKNRNMDNIVTEKSKRRVHKILKCKQNTCNIVWSRDIMAAHNILDMFLFAARNNNQRFDVFTRQGASNDQPSALVTVNMLSSVGVNPSGFSKLLCTRFYAHIVRPQLEYDLVINRFTISQLYALEEAQNNCIKKIYGARGKASIKIMLYMPKLPIVSERVSILQAQFLFRSLDLPEDALLVCLLPYICNTRGSQWYALSHTSL

SEQ ID NO: 3237 - protein, 499 aa, Rhizopus microsporus
MDLKYAQQIDSYEVTKINTAYLNRVFFHFGNKLRMFLNMILKKDERIKAVKNKMKKDSGSEEKVSAIVKTIVEQCNKVKMYVSSRKINDLPRDLLSSQDVDIIHDIFSSYPLNYQFVKGLIYYDCKANALKHLKAFYKISSMCEILQEKSFNCFPLRRIFIPSYMTIDTLILNTQILKNPVTSHLDKEIVWASVLNVAAKAMKPQGERRTMKFRGMLFTDGVGVSVLKQNDDMKKGGSGAGRRAKAVDEEDFKYIEKLEKEELLAGVGKCVSIDPGRRDMLCCMHKESTIENKRTYRYTSNQRAIETKSRKFKKLRENLKPDDVRTVEVSLSKCKSSTANGGKFAKYLQKRATVTPVLSKYYANEDIPAVETNLLPFRKMKLSSFINGQQADKRLARNLRTKFGDDTTLIIGNWSSGNVKFHEPIRDVRMRRMLAKQGFKIYFLDEFKTSSLCPSCLSGKLESSKMYKIQDLSREKSNQLCKNQQCLEATSGTIPRHRL

SEQ ID NO: 3238 - protein, 272 aa, Rhizopus microsporus
MSKYSSNESMVKSLLQIPSSMIIKASDADVGSGYYNVRRKLQKAKKSSQGQTIQDPENNLSNLDLRTSTRVEQALEIHQQYVSNRLAPRNFYNSKKRAQLKRAYEVQNNRFRRRLCAKERTCLIGKKGKKHSSIRLMNTKYYINYLVKGKSRLCPVMFTGDRNTRVGSKTKGFRRYGGKWKQELHGMNVNVCITNENISQTCIYCFSKLDNPIHRKMIKDKEIKTQIKESFLCQNSGDVLVSNKKAVKPRDDLSPLVRPFWSMLATLSVDIS

SEQ ID NO: 3239 - protein, 272 aa, Rhizopus microsporus
MSKYSSNESRVKSLLQIPSSMIIKASDADVGSGYYNVRRKLQKAKKSSQGQTIQDTENNLSNLDLRTSTRVEQALEIHQQYVSNRLAPRNFYNSKKRAQLKRAYEVQNSRFRRRLCAKERTCLIGKKGKKHSSIRLMNTKYYINYLVKGKSRLCPVMFTGDRNTRVGSKTKGFRRYGGKWKQELHGMNVNVCITNENISRTCIYCFSKLDNPIHRKMIKDKEIKTQIKESFLCQNSDDVLVSNKKAVKPRDDLSPLVRPFRSMLAALSGDIS

SEQ ID NO: 3240 - protein, 334 aa, Rhizopus microsporus
MFANTVKSGGFSVDFVFSKRKTKDISLTANIDLKLEDFGLEEVKQTYQPMFLDPGRKSMFTAAICLDTTNHQIRRCSTAEYYHITGSTKYIKQLEKLKVQKGIKEIENSIPSSKTAECVAYLLYIKYILTHAGVLFAFYDYKTAKDHFYLYQGKQRAAEETVNMLAHGGTKYNKRKKRHRKKKRSKKQKLMANPKEKKNPVAKNSQNWKPVKFQMEREKVPLVVFGARMFGKDSIKLKGNRLASLVFFWRALKRREAAKDLIAVIIDECKTFKVCNACNNDPLTSMFGLKSRNVQVCNFCKALWQRGINACKDALPISLSVWDGRGQPFKHSRN

SEQ ID NO: 3241 - protein, 271 aa, Rhizopus microsporus
MLYCVHENSTPEQPQDKTWKTKKYPQDPDVVQAEQALSQQPSSTVPVEGFGRFLQARSEQSAVLSRFYGHTITNYDNGYPLFRKVRLSTYFNKQRADQKLIQDLRTKFGEGAVFVMGNWPTPHATYHEPIHGLGFRRLLKKHGLQVYLIDEYKTSGCCPTCHNESLHTFRRIPNPRPYQRERSPAVVCHGLLRCTKLYCRPAMAAPDRYRLWNRDVAACLNYMHILRELRRNGMVPHRFRRVAVAPTRRRRRVDDQEQPRTRIRLDDDSPS

SEQ ID NO: 3242 - protein, 275 aa, Rhizopus microsporus
MLYFVHENSTPEQPVKFRYTKQQQDKTWKTKKYRRILQDLKAQDPDVVQAEQALSQQPSSTVSVEDFGRFLQARSEQSAVLSRFYGYTITNHDNGYSLFHKIRLSAYFNRQRTDRKLIQDLRTKFGEDAVFVMGNWSAPHARYHEPIHGLGFRRLLKKHGLQVYLIDEYKTSRCCPTCHNESLHTFRSVPNPRPYQRERYPTIVCHGLLRCTNLYCRPAMAAPDRYRLWNRDVAVCTNYLHILRGLRLNGMVPHRFRRVAVAPTRRRRRVDDQEQ

SEQ ID NO: 3243 - protein, 316 aa, Rhizopus microsporus
MFANTVKSDGFSVDFVFNKRTTKDATLIANIDLELEDFGLEEVKQACQPMFLDPGRKSVFTAAIGLDTTNHQIRRCSTAEYYHRTGSTKYIKKLERLKAQKGIKTIETNMPSPKTSQCAAYLLYIEYVLTHVGVLFTFYDYKIAKGRFYLYQGRQRAAEEMEEKKKQEEAKTDGKSKRKRESNYQKQKPKVEARKVPNGKRESAPCSLWCGNVWQRLDKAEEKQVWRQWCFSASAKKETAGDLIAVTIDEYKTSKVCNACNNDSLTSMPGLKGCSVQVCSICKALWQRDINACKNMVSISLSIWDGRGRPFQHSRN

SEQ ID NO: 3244 - protein, 742 aa, Rhizopus microsporus
MSVEAEQSNNTTFSQSEYRRITTIKTSLNGIGWKENYRATLNEFVCSVNDLVTHGFAFAKFIFLKEFNKDGEFDFNKYVTKAFFQEVLLALVDRKTKEGRLAEKTRDIRQLINTYKDEYIQVSSYIPITLTNAQQIALYEGTKIHTVYINNVAQHFGNRLRMFLNLISNKKEKIENMTQEMKSKGFTDEEIKSSVRTHITNVCTQLKLNVSAKKFPDIPANFLDKKALEQLQQFLDVYPEHYKFKKDSIYYDVKSSPQNHLRAFYTLAKLCEERKNKSFTCFPLQTSFVPCYVTIDAKILNYHILKRKSFPVGQKHELWKQVINYDCKAIKCSTTMNFEGTLDTDGVGVSLLKQNFSPDRRGTLNVERKPLKADNDEFRYLESLSKKELDNTLKKCVLIDPGRHDLLFCMHEDSSIEEKKLFRFTRNQKLVETKARRFNKLRKFMKPAYIQELEASLSKIPAATVDLVKYTKYIKRRSKVSQPLKRYYSSEGEFLDRNIGYVYEDSDEDDPAIGIDDTAAATDNICPKPAFECKKSKNKLGTYLSNLRYIHQENNTQIQLAEDDITQLNTVIQQTDEILQKPETTEEGFESQISIVKNLLEETKAKLPTLKFRKMKLQSTINRQQSEKRLANALKAKFGEDAVLVLGNWSASHVKFHEPTKGKGMRKMLRHEGFEVLLIDEFNTSSICPECNSDLKKFKTIENPRPYRRSKMLEVTCHGLLKYEYCIQILVVGIFHLTLICL

SEQ ID NO: 3245 - protein, 477 aa, Rhizopus microsporus
MKRHSTSSSSERPSKGAKLNGCTVAPTQEANYSSTVNQEGAPSSSSKPGLSKKAQQKIDKQNALLKFKTEQKALKEVKCPSCELTTHARSTSNLCPNKKAKVPVCSPDERVENFVIKTSLPNVCNNQQLVQYIKDLTDYTTKVLFVGSLFANFIFVKLLDDSQTIPIIEQSLFTNIFAVMTENGKRALNYLKEYFTLFCELTTVDRDSLKSINYSSIPSIAGKKTESDLTDFYYHLFNFTKLGFRTRDSLTSGKKFRNVITTDGHSISFLFTRTVKRSLATTKNPSDFIDDIRNGCDIWGVGPGVSTTLTAVDTSGRQRTTSLDEYYHLCGYNNANFIRKKHQEQHTAQFLKISNLSSLKTSNITEFTKACQERLSLYDDITSYYNENAWSSKLKFQCYIRKQKGVHEICKRLMHGSVKYNKKASTRAKTSPAENESKYCPPAPLDHPDKPRKTIIAFSDGMFNNSLRGNRGAPVRL

SEQ ID NO: 3246 - protein, 497 aa, Rhizopus microsporus
MYFQYCSYEPMDLKHARQIASYEVTKINTAYLNGVSSHFGNKLRMFLNMVLKKDKRIKAVKNKMKNSGSEEEVSAIVKTIVEQCNNVKTHVSSRKINDLPRDLLSSQDVDIIHDIFSSYSPNYQFTKGSIYYDCKVNVLKHLKAFYKISSMCEILQGKLFNCFPLRRAFIPSYMTIDTLILNTQILKNPVTNHLDKEIVRAPVLSVAAKAMKPQSERKASKFRGMLFTDGVGVSVLKQNDDMKKGGSGADRRAKAVDEEGFKYIEKLEKEELLAGVGKRVLIDPGWRDVLYCVHEESTIESKRTYRYTSSQRAIEIKSRKFKKLQKNLKPDDVRVAEVSLSKCKSSTVNGDKFAKYLQERATVAPALSKYYANEDIPAVETNLLPFRKMKLSSFINGQQADKRLARNLIIKFGDDATPITGNWSAGNVKFHEPIRGVGMRRMLAQQGSKMCLLDECKASSLCPSCLRGELEKFKKVQNLRLFQSEKQPAVTCHGLLR

SEQ ID NO: 3247 - protein, 274 aa, Rhizopus microsporus
MLYFVHEKSTPEQPVKFRYTKQQQDKTWKTKKYRRILQDLKAQDPDVVQAEQALSQQPSSAVSVEDFGRFLQVRSEQSAVLSRFYGHTITNHDNGYPLFRKIRLSAYFNRQRADQKLIQDLRAKFGEDAVFVMGNWPAPHARYHEPIRDLGFRRFLKKHGLQVYLIDEYKISRCCPTCHNESLHTFRRVPNPRPYQRERYPTVVCHGLLRCTNLYCRPAMAAPDRYRFWNRDVAACLNYMHILRELRRNGMVPHRFHRAAAVPTRRRRRVGDQE

SEQ ID NO: 3248 - protein, 481 aa, Rhizopus microsporus
MKNRMPTLPVSKVSLNNGPFKILPVLRHILEQYENLHMAQPSPIDKDNASKFVPPRLFSLFPNPGLGWRFIKVDAQNLTGILPEAKQEKQINESPFDHNQRQFFQMFDFKKLGFRSWEELKNMPEQRGRMFLNGMYTDDYTCSVLFCRKVLLSSVAYGVSLELSDFTTDEVDKYFRPCTVDPGRKDAFVSYHGGTDIRRLSSAEYYSMSGTVNRQKAQQGRKQSLGIESIETNIPSPKTASTQRYMLYITYILQHMDSLFNFYNFETTKLKWLNYIGSQEVIQESVNILLNGGKKYNKSRRKNTKKNRKKKEKSSKTCGTHASYHTIRKNKTRFEEGDRKKKPLVIFDDGLKNKGHIKFKGLRRGVSNKIYRQLKRREGLGELLLLDINEFKTSKASTCNSCLSQDLQNLKCGEGDDIKKIHQVLKCNTCNIFWNRDVMAAKNMLTISRCIWNGQGRPNVFKRQLTTSNVVASSHSGGALA

SEQ ID NO: 3249 - protein, 275 aa, Rhizopus microsporus
MLYFVHENSTPEQSVKFRYTKQQQDKTWKTKKYRRILQDLKAQDPDVVQAEQALSQKPSSTVSVKDFGRFLQARSEQSAVLSRFYGHTITSHDNGYPLFRKIRLSAYFNRQRADQKLIQDLRAKFGEDVVFVMGNWSAPHARHHEPLRGHGFRRLLKKHGLQVFLIDEYKTSRRCPTCHNESLRTFRRVPNPRPYQRERYPTAICHGLLRCTNLYCRPAMAAPDRYRLWSRDVAACLNYMHILRELRRNGMVPHRLRRVAVAPTRRQRRADDQEQ

SEQ ID NO: 3250 - protein, 267 aa, Rhizopus microsporus
MLYFVHENSTPEQLVKFRYTKQQQDKTWKTKKYRRILQALEAQDPDIVRADTISVEGFGRFLQARSEQSAVLSRFYGHTITNHDNGYPLFRKIRLSAYFNKQRADQKLIQDLRTKFGEDAVFVMGNWSAPHARLPKEHGLQVYLIDEYKTSRYCPTCHNESLHTFRRVPNPRPYQRERYPTVVCHGLLRCTNLYCRPAMAAPDRYRFWNRDVVACLNCMHILCGLRRNDMVPHRFRRVAVAPTRRQRRVDDQEQPRTRIRLDDDSPS

SEQ ID NO: 3251 - protein, 300 aa, Rhizopus microsporus
MKPQNERKTTKLRGMLFTEGIGVSVLKQNDDTKKGGSGAGRRTKAVDEEDFKYVEKLEKEELLAGAGKCVLIDPGRRDMLYCMHEESIIESKKTYRYTSNQRAIETKSRKFKKFEESLKLDDVRAAEVSLSKYKSSTVNGDKFAKYLQERATVTPVLSKYYANEYISAVETNLLPFQKMKLSSFINGQQADKQLARNPITKLGDNGTLIIGNWSDGNVKFHEPIRGVGMRRILAKQGSKVQKLTMFGGHDWYNFSSSPLEPRYSGHFKFQAHPFWAAKATSSASSRPTKKITNPLKLPLY

SEQ ID NO: 3252 - protein, 967 aa, Rhizopus microsporus
MNMVLLELRNCDMITHGSFTIANILPDGFLPSQDCTIEHTIGPLSVADSFMKDFSMLMEHQHISLIHSYYFGSVGAKETNLNKHPVQMAIFKALESSGIERGKFKETSLKSYEMGNALVDVTTNMKNMWSTPKIFYGLMNSLLDVLLRVHLVPNREAKYRSYIQKKAEERSKKDSQQPVDDNSRTSTFADLPRNARRNIARGEEYKKKKYEAKIKRKPEEAHKWKAKVDTYQKRIDGYKMAVLVRCLIFVLQDIDNVIKNDDEDDVEEEELITGNTTDLTRRRLRCLKSVLKSLLLDDRKDEFSIDDLKKECSDVEEKEAYPCLLILNALKPYIPKKKERFIIAHQLPFCILANDTLLYAGYRKFYRKLCPQPSASSLHALRIDGPSLYQILTRLPCALAIFNYDNYLIESVEEARQNKDAVFSSLFDMNAIATVCKSKGRPLAWNKGFCGDSSKKKGPASYELTDHPTVKEESKKPKETLVQEFQGMQSEVVQIEKLLKDALKNNNNRDFSKDIKDLKAKWRNSSLEEKVDLYSAIEQVQDERDQSFLSVQAARDKLKLKRQLMHFKRVAMKQKPAITHETATTSQSSNTQWHIVQKYGHGIAKVEDCRLSPQVNPSEEFIFSGTDNGLKTMTSTVPLTMKRFKFHLELRNKYKALENIDECKEEAQKIVSKYSSEESDAKSFLQLPSSMAMKTGDIDIGSGYYNVRRKLEKAKKSTEGKAVQVIENNLSKLDLKMATSVEQAMSIHQHRISNRLALRNFYNSKKRVKLKRTCEMQNDSFRRRLCAKERTFLIEKKAKGRSRPCPIMFIGGRGTGVGSTIKGYRRYGGKWKQCMHGMNINVCITNENITSQTCMYCFSKLDHPIHRKVINGKEIKTKVKGSFLCSNPDCVLVSNKKAIKSRDNLSALAIGLSGLCSLLFQETFPELSAKISQSNTDFINKTASFLNARECWDTGRDASNRDRIVTS

SEQ ID NO: 3253 - protein, 305 aa, Rhizopus microsporus
MTPRLQRQSEIRGKPSIAGSFFAQTQTNLFKNTSFEASDNDFQGTPLFRKIVVINKNIRTTLKAVKEDASSPGPSNIVTRGKAPMPTVNNDTSAQAALPAPIPFTSCTSAPIMTSKKYQDKVDKTEALKKEKEKNKTTSNERKQLCPMNKSKAKLPKTKDIAEKPFVIKTSLANACRYPKFVNLIQEVVDHITQLVYAPTKRITEEIRRKCKQSNEGTEFISVDEYLASQICNKCKFKQLNNISTTGSKRRVHSVLKSESCGTVWNRDVNSALNIYSIFVYKSKHDNESHPLSKDLQKTNGAPWI

SEQ ID NO: 3254 - protein, 264 aa, Rhizopus microsporus
MAFIFEQNKCCHSVSIQDEPRREPKASKDFADIVDDAEIWAVDPGISTIFTAVDSTEHERIRTTSLEEYYHLYEFKYISKLSTLKTANLTSFLLAASTCLQNYQRIYSYYYQNKWFQKLKFKTCINKQKGTQEIVKKLFDNSKKYNKSSTVGPKNQKPNKSKHVPLPPADLPSSSQRKRIIAFGNGSFCSSMKGKRAALTKRIAEKIKRKCKQSNEGTEFVSIDEYLTSQICNKCKSKQLNNVSITRSERRVHSILKCDSCGTV

SEQ ID NO: 3255 - protein, 310 aa, Rhizopus microsporus
MKIDNGLSKLGKITFSGTDNGLVTMTETADFDMKRFKFHLDLYNKHAALENLSEEGKVDTDIMDRAVTNINMLNHYVSGQETSEYTIQIPSYMVHAFEVDYKNGAQKYKKQRERAKNLTDIRRQVMETEALLSKVDTTSARNLEHLNELHNMYIEHKHIIRNFYYSPSRLKQKRAYELQKRKYTDRLCSNERRYATSSRKTELTIFAGDRGLVQAIYKNGTGRLRTINGAFICDNPSFVSVQAKKAVKGIDNLSAMEIGLSGLASLLFDAIFPQIDPQASQPNTDKFKTNAASFFTANEDRPAVDDSNIS

SEQ ID NO: 3256 - protein, 251 aa, Rhizopus microsporus
MLYFVHENSTPEQPVQFQYTKQQQEKTWKTKKYRRILQDLKAQNPDVPSSIVSVEEFGRFLQARSEQSAVLSRFYGHTITSHDNGYSLFSKVRLSVCFNKQRADQKLIQDLRAKFREDAVLVMENWSAPMLYKTSRYCPACHNESLHTFRRVPNPRLYQRERYSTAVCHDILRCTNLYCRLAMAAPDRYRLWNRDVAACLNYIHILRGFRRNGMVPHRFRRVAVAPTKRRRRVDDQEQPRTRIRLDDDSPS

SEQ ID NO: 3257 - protein, 225 aa, Rhizopus microsporus
MEGFSRFLQARSEESAVLSRFYGHTITSHDNGYPLFRIIHLSAYFNKQRADQKFIQDLRAKFGEDAVFVMGNWSAPHARYREPILGLDFRRLLKKHGFQVYLIDEYKTSRCCPTCHNESLRTFRRVPNLRPYQRERHPAVVCHGLLRCTNLYCRPAMAAPDRYRLWNRDVAACLNYMHILRGLRCNGMVPHRFCRVTVAPTRRRRRVDDQEQPRARIRLDDDSPS

SEQ ID NO: 3258 - protein, 260 aa, Rhizopus microsporus
MLYFVHENSTPEQPVKFRYTKQQQDKTWKTKKYPQGPDVVQAEQTLSQQPSSTVSVEDFGRFLQARSKQSAVLSRFYGHTITNHDNGYPLFRKIHLSAYFNKQRLRAKFGEDAVFVMGNWSALHARYHEPIRGLGFRRLLKKHGFQAYLIDEYKTSRCCPTCHNESLRTFRRVPNLRPYQRECTNLYCRPAMAAPDRYRLWNRDVAACLNYMHILRELRRNGMVPHRFRRVAVAPTRRRRRMDDQEQPRIRTRLDDDPPS

SEQ ID NO: 3259 - protein, 256 aa, Rhizopus microsporus
MLYCVHENSTPEQPKAKKYCRILQDLKSQDFDVVQADNTISVERFDYFLQARSEQFIALSDFYRHTITNYDNGCSLFRKIRLSAYFNKQRVDQKLIQDLRAKFGEDAVFVMGNWSAPHARYHEPIRGLGFRRLLKKYGFQAYLIDEYKASRCCPTYHNESLRTFRRRHPTAVCHGLLRCTNLYSRPAMAAPDRYRLWNRDAAACFNYMHILRGLRRNGIVAHRFCRVAVAPTKRRRRVDDQEQSRTRIRLDDDSSS

SEQ ID NO: 3260 - protein, 260 aa, Rhizopus microsporus
DILCCVYENSTPEQLVQFRYTKQQQDKTWKIKKYRRILQDLKAQESDPSSTVSVEHFDHFLQTRSEQSTVLSRFYGHIITNHDNGYPLFRKIRLSAYFNNQHANQNLIQGLRAKFREDAVLVMGNWSASHARYHEPIRNLGFQRLLKNHGFQVFLIGEYKVSRCCPTCHNESFHMFRRRYSTVVYHGLLRCINLYCRPAMAALRMLQLASIMHILRGFRTNGMVPHKFLRVAVAPTRHRRRMDDQEQPRIRTRLDDDLPF

SEQ ID NO: 3261 - protein, 205 aa, Rhizopus microsporus
MLFCVYENSTPEQPDPDVIQAEQTLSQQSSSTVSVENFSRFLQARSEQSTVPRRLYGPTITNHDNGYPLFRKIRLSAYFNKQRADQKLIQGLRAKFGEDTVFVMGNWSAPHARLLKKHRFQAFLIDECINLYCRLIMAAPDRCRLWNRDVAACLNYVHILRELRHNGMIPHRFRRVAVAPTRRRRRVDDQEQPRTRIRLDDDSSS

SEQ ID NO: 3262 - protein, 344 aa, Rhizopus microsporus
MSFQTFYEDGHGNGVDEYGRPEPMDYIIDEERYALETVNSNTHYLHNQLQENNFDVGSIADEDAKDDVDVCMKKVSSKRAYTLYTDLDKVRFFKLMFEKVMSASVAAKVFKIEVRQANKIHGKEISGRCVAVDPGRRDMLYFVHENSTPEQPYRRILQDLKAQDPDVAQAEIVDTPLSAKFGEDAVFVMGNWAAPHARYREPIRGLGLRRLFKKHGFQVFLIDEHKTSRCCPTCHNESLYKFRRVPNPRLYQRERYSTAVCHGPLRCINLYCKSIIAAPDRYRLWNRDVAACLSYMHILRGLRRNGMVLHRLLRVSVAPTRRRRRVDDQEQPRSRIRLDDDSPS

SEQ ID NO: 3263 - protein, 278 aa, Rhizopus microsporus
MLYFVHENSTPEQSVKFRYTKQQQDKTWKTKKYRRILQDLKAQDPDVPSSAVSVEDFGRFLQARSEQSAVLSRFYGHTITNHDNGYPLFRKICLSAYFNKQRANQKLIQDLRAKFGEEAVFVVGNWSAPHARYHEPIRGLGFQRLLKKHGLQVYLIDKYKTSRCCPTCHNESLHTFRRVPNPRPYQRERYPTIVCHGLLRCTNLYCRPAMAAPDRYRLWNRDVAACLNYMHILRELRRNGMVPHRFRRVAVAPTRRRRRVDDQEQPRTRIRLDDDSPS

SEQ ID NO: 3264 - protein, 265 aa, Rhizopus microsporus
MSNDNDLTLWYFNVFDSSKIGYKTLESLTSRSEKFANVITTDGYAVSFMFKKAVAIQDESKREPNTPSISTIFTAVVSTEHERIRTTNLEEYYHLCGYSIATRRRKEYQECHLDEFKYISELPTLKTANLTSFLLAASIRLRSYQRIHNNYCQHKCIGLKSYSSRLISTSKKELKKLLKGSLTTVRNIAHQAHLALKPNPKQKQTCTSTSSPQKRTIAFGNGSFGSSMKGKRAAPTRRITEEIERKCKQSNGEPHLIMLTSTSQV

SEQ ID NO: 3265 - protein, 286 aa, Rhizopus microsporus
MYGYYARELMEVLTPHIGIRGIFVMVDGSSEDVNNKKTVKERLVKFSNNEYKARLGFDRSKQIELKNRAAAEMQAIYDEIPSLGSGNSSTVLNYLQALSKYRKKIFCFMRGYRHREAKGYLYSNRQITDEYMCQLVLAKTSPGAHCALAHKTSTKIRQKVRRSFKKNNHANQADDGRRTVIAYGDASLPGTKKESTPILVKRTQRALAKKATIISIDESRTSITCCKCHRKLDQKYEAQTLVCNHSVQKEGQALKHCKLCPAANGQDIVWQRDINAAINIRSILIS

SEQ ID NO: 3266 - protein, 359 aa, Rhizopus microsporus
MAKLCEQAGNKSFMYFEKNPHTLLCDDRYHDLEQSYSYLEQNGQFVKQSIKDQSESKAMKFQGMIQIDGIDVSVLKQNKESSKGGTKRMCMKGEDECQYINKLTTRELQETINKCVFIDPGRRDLLYCMHERSKPNSKSDLYRYIINQRGKETKLRKFTKLRQNTKPEEVKQSEAYLSKHPTSTVNVLQFAEYLKARARVHGTLPTYYTNEDNEHYDYDLLHFRKTKLSSIVNRQQSDSRLSAKIREKLGKDSVLVIGGWSVANQKYHELIRGKDMRRMLKKRSLSVYLIDEHKMSTFKDEELEKFAKVPNPRPFRPMHKSRMFGVQKSMEWDLVAVLNLKAIIEGHRQALCRPSRFQR

SEQ ID NO: 3267 - protein, 359 aa, Rhizopus microsporus
MAQPKTKYKESEDVARYMESLAQEELNETKSKCVLMDSERRDLLYCMKETRTAQNKQVMVYTKMTRTKVPRHYRILQNKAKPAFAKSSEARLAKAKSSSVKIEEYEMYIKTRASVEKVLCSYYGNETLQTRIRGCFPQSDESTSIDMHATYLELMIKQRHISERLDNDDKTKLLEIVAKMSKENSDQDSLKQQAGEKLEKLQVFPFRKMKFSSKLYYDQDDLMLMKKLKQKFGSNAILVLEHRLSVIYVRVGWRTLKQYAIQGPTRERLGLLYSVMDYNGKNDDNARHYEISNHNSYCDVRCTNFDCLEQSKPRLWNRDLAAAVNIKKILTSLREKGTRSELFTRTKTEESSTKVIARS

SEQ ID NO: 3268 - protein, 742 aa, Rhizopus microsporus
MSVEAEQSNNTTFSQSEYRRITTIKTSLNGIGWKENYRATLNEFVCSVNDLVTHGFAFAKFIFLKEFNKDGEFDFNKYVTKAFFQEVLLALVDRKTKEGRLAEKTRDIRQLINTYKDEYIQVSSYIPITLTNAQQIAFYEGTKIHTAYINNVAQHFGNRLRMFLNLISNKKEKIENMTQEMKSKGFTDEEIKSSVRTHITNVCTQLKLNVSAKKFPDIPANFLDKKALEQLQQFLDVYPEHYKFKKDSIYYDVKSSPQNHLRAFYTLAKLCEERKNKSFTCFPLRTSFVPCYVTIDAKILNYHILKRKSFPVGQKHELWKQVINYDCKAIKYSTTMNFEGTLDTDGVGVSLLKQNFSPDRRGTLNVEGKPLKADNDEFRYLESLSKKELDNTLKKCVLIDPGRHDLLFCMHEDSSIEEKKLFRFTRNQKLVETKARRFNKLRKFMKPAYIQELEASLSKIPAATVDLVKYTKYIKRRSKVSQPLKRYYSSEGEFLDRNIGYVYEDSDEDDPAIGIDDTAAATDNICPKPAFECKKSKNKLGTYLSNLRYIHQENNTQIQLAEDDITQLNTVIQQTDEILQKPETTEEGFESQISIVKNLLEETKAKLPTLKFRKMKLQSTINRQQSEKRLVNALKAKFGEDAVLVLGNWSASHVKFHEPTKGKGMRKMLRNEGFEVLLIDEFNTSSICPECNSDLKKFKTIENPRPYRRSKMLEVICHGLLKYEYCIQILVVGIFHLTLICL

SEQ ID NO: 3269 - protein, 237 aa, Rhizopus microsporus
MYRIFCFMKGYNHRETKGYLYSNRQITDDYMCQLMLVKTSPGALCTLAHRTSTKTRQKARRSFKKSNQTNQVDDGRRTVIAYDNRTQRALAKKAIVISVDEVRTSITCCKCHRKLDQKHETQTLVYNHRKKQLRLGGKKNAAQQCLDDDHHVICQTLQCSERRPSSFLPAIYQLKQCRLCSVGNGQDTVWQRDVNAAINICLILISYIESGYKILSRHLSLTRGGTFDSEGATAQPL

SEQ ID NO: 3270 - protein, 335 aa, Rhizopus microsporus
MARLFSLSPVSSLKWRSVSINPNTLSSFAGKPKQSNYEDKFNMFNTVFDLSSLVNHNEYSFEDLKKPAAKNKTAFANLIRSDGFAADVVLYKGVSNNEDVTEQSSDSTFGIQLLSDVLKPGDVDNFSLCGLDPDRQHAFTASYNEGENSHQIRRVSTAEYYNYTGSIHHQRKEQKRMEKEGMKSVLLNIPSIKTTSLMQYHMYMTYIMANIQKILDFYGYETAEGRFHCYQGVRRAREEMVNILINGGKKYNKDRRKNTRKNRRRGKKKKEKRGKDEKKKDEECSERPEKQWWPQRNSYDREKKPVVAFGSGMFGKDSIKFKGHRTGITGVLTEH

SEQ ID NO: 3271 - protein, 574 aa, Tilletiopsis washingtonensis
MPHQDQEMLRRRDFHMLKKMQAASSQTPSRTPRELLEELPGGAAVDLLEGWVRALQPAAAVGRSRPKAAGTFHQIFTPSSLPAVARAAPGRLAALGKWASQLSLTEHEWLERCGLFQDGNLWRPRPSLLSALEAMAATSRGAAEGTVTRLEALLSGSTTRSSRSPRASPWARLGFRPAWLPTGTLYSDGVNCRWLYVNLRRPKGRSDAETVQSMHQNVEVYARGSMWLAALPPAALQAALRAPLPLPSDEDFTPPRGRAGGLVRGMPDFKIKALLADADPDSTVVHVGIDPGNTNVAALHRTRPLLPGTIIEFPGTPPPELGLRPVVNAPRRYYANAAACERWDRWETLSIKPGALQRRTKAEPVHGAQESSERGALRPLTKAEPVRSAADAFARISHAFGVGAPHAEARKKDVKKKRGRAADEIIEWLACAPGFYSRRFQKWEEEKKLVVVAHVGDWPGGTSSGGGRGFKHPTHAGPLLRTVMQRAAFTPLPATILWRTQDEYLTSSVCPRCADAPPLLPLWRSRSARYPSRDVKYCPHCRCALARDMVGAANIAHAGVHQLNWGVGPWRPRA

SEQ ID NO: 3272 - protein, 1373 aa, Tilletiopsis washingtonensis
MGFTTGGAGGGGHTALAPALIGGESVRARKLVHVHRGERAALEHAIATGGPLRFLLVDTTPIEYAITARMADAAVPVPQTAAALRSAVLAALRAELLRLGALGLAERSIFCWDGPNVALIKKDTTSKRMQAMATGLLAWQREAAEAAPREAQLRQHATHAAMAMLSDLYTPEGVAALVADLPGHVTADEDAVAGSAAPIVHVVAHNEADLLIARLSRSLGHGESSAVLSIDSDMLVHALDAYRWVVRAVPLEEHDVPGAPPPEFHWQHLFDRNRLAHALNTTWSAAFGPHLDEARVLAFVALCRTDYGNGLHRIGPKQLINQRQLANALLHVGARPLLAARVHAIIERVGHNHTAAEVAAVQRIADVYLLAEHGATETRAKCRNEATRAAAQARLGFRDGSRLAHWEEHPQEHRPVVPPLRAPDHGNVGGKALGFKQQVSRAVLSHKPDILVPRTQGNVPTTHLTPKRPAPDRVFDKSKQEAAKSKKPARGSTAVKLLRKTPKVYDGGASTTKIKDSTVDKETMTKHFGLATHCTSMAALGNSGVSEAHLRAVPGFAALVSTEAYSNQHCIVVWRVALGEMLKLQPGWLTCSDATAVDRLRHLFLVCRSGCSSKSFLNKGMAAPNGYTNDEFAAVRSSGGWSDEMVQARRAVQQAGYVLPDFAMLDKATPNVLAAHIFGEWSRLAERVRGVVSSAIHLRYGHNKRGRTLTKRLWSCELPDRHGRAQHGVARDSELQALLSQRDAHVVAARRTLEDSAEGGWDLTLDQIMRSARGTVTLHLLQGWAEALSGKALLSGTAAPSFVGIFTRSSLGHFFRFGAKRLAAFASWIDTNSTLLRAAADSERLARCGVVRHPGRWALRPDLPSICAEMQFRVRRQLGLSPELTKDCTSFDKAAMDSTLHFLETALDMSARQAWGAMGMGVAWVPTGTVTSDGASMRWYYCNLTRPVRFRMLDANAPPEEDKYRVGAPVLSECAARLAPHQSSMVWRRLQRHERFCGVQVGVRRAVVLPLPSNEDFTGSPAARTSANQGALSGTTSRKNTRLAIGKAQAAGRPVMHVGVDPGINNIVTMARFVDMEPGTYYTCPDGTHPDGRAPLTADERVAARLPPLAPTRTKRSLSDELYGATDEDRQRWRRLQAVALKKETMTDQCNWLASEIAKLRRTHDAAAPVGVAARHMHAAAFEQSPAVSALRDELRRVKKRQLQLAVDAILEWLVMREGVGLMSQRFQTWGSRDALVVVHVGNWKSTRRPGLAGQTSSVLLRECMRQARLRGLPIVWRLQDEFMTSQACPSACTSTGRKIDSKKNLRGEPQRLSGLRRRFRSRAVRDIKHCTSCHRTYARDVAAAVNIMLAGLHQLRHNCGAFRPPPPKPLRQ

SEQ ID NO: 3273 - protein, 414 aa, Tilletiopsis washingtonensis
MLKHGSSAVSWARRNSTAAGLAESDTHVAIAHSRARTYRGVLQRASRPMPPDATLSLRVNIAQWSMKSAEATAAGRPVHYVGMDPGINNVITAARVFDLKEGTLYTLPGQQTHPDGRKPITDAERQDAGLPALDPSKNGRTTRDPLFRATQADTEEYGRIQAIALTKGTLDEEANRISAKIQMLEAEHELPDTADPGTRERHKAAFNQRPDVSALRDLRMVVQVRQRNLAVMAILEWLLMREGGVMAERHQGWSRDGALVVVNIGNWQSVRRVGLPAQCSSEILRRCTALTEIHGLPIVWRLQDEYLTSSVCPAGCLSKDGARVDGKANPQGTSQRVAALRKCYGNTPLRDVKYCPCCDRVFARDVLGALNIRAAGMHELAYNTGAWRLRRAESESIAAPAPHTGRGTRAAAGS

SEQ ID NO: 3274 - protein, 1360 aa, Tilletiopsis washingtonensis
MGFSIDRSGHWLLRSLVAGTYDGESDALAYARRHSQRLRFLVVDATPLVYSIVSRTCAEAGVAEAGVAEAGVAEASLANLDELVRACIAAVVEEIWRVAALLDGDDKRVIFCWDGAYVAQTKLDTITRDRMRDRIIHAESYRREASHRRPRIEELRRHAAAAVMQRLVNRLYSSGGLDELFVQHLLQHALCEEEMLENALAIDERTKTVLHIVARDEADCLIGRLCPRLQGSGESAVLSPDADLLVHSLAAPQLSYRWVVQPLPVTRKQRRQRSALPPPAFHRQHLYDQQRLLAIAPLVLASVALGTTDYGNGLPGVGARALLGKDDWLPGLAAAVKPGLVSRAWADMAASAESVQAQTHRLIQRVAALDSKKKHSAIDVARVCSIANVYILSTHAATETVPRPSFSEGPGHGWRNTLGFFANKRFMRCTPKNGAAERTPFVPTLDALPRLRKQLGGRQTAVGRTYLVPVEDAAAMPIGAPREGPNWDLLPRKKPRSVKPARHRPSQSKRAAQRAARQDEEPLVVRKKTVSMPGAAAKEKLVGIFGIATVRSTSADLDSTYVGMASTVVVAGQYLSVAVQLTLRELLLLEPTFLACEDIDLDARLRTLCQVCRSASPLWTRRPDSAALSAELSALSAEERGLMRLKGVTIPMLLARRATADRMSLPPAALADEHCISSTAHSILSLRARQLKKWCGLADRLRSLLAKALRTAYGDKHEAMLRAALDTPLDESPVCSADVMELLTVRNKHMHAARLQLPEPDRLWSSTPRQMLETLRGAAAVHMFRAWIERLSGTSVLDGTNFCPDFVSIHTRGGLTPFVREASARLGALAALANRSHPAPAPFEHEALVRCGLFFDRQQWAPRPHVAAEHKSLLARLKRALGLSTTTSRVYELEARAGRHWVRAFESILGVPWRSLGFRKPAWLPTGHVESNGTQMRWSYVNLARPKRRHMATAGVAQSRPLYEDQLDSAWGRRLQAAPIATLPLASNQRFEPARASRTSASSGGIGGTTPDKEIRERLAAGPGAVHHVGVDPGLNNVLVLSRRRPLRPGTVIAFPEPPSPKLALLQPLSAAERRHLGIRPSEPPCYRATAAACKLYELSESLTLKPGSLRSDKPLKAASEPHHPGDDVQRALAKMLTPVPTAMERERRILRHARQQRRAQDELLEWLVPGSRPGFLAQHLQQWQQGDSPALVIAHVGDWVGHKASKPALAAPVLRGVMQRAALASPSLPILFRKQDEYLTSSVCPERCEDDEGSAAAAAATAAQTNKKGTPNVVVGTAPEHARSPVPAARLTSVYRSATSRPVHGVKRCTTCRHLFSRDRAGAANIRFAGMHELAFGYGPFRPRPKKAVGAAAGTAPAS

SEQ ID NO: 3275 - protein, 1238 aa, Naegleria lovaniensis
MNNQSREENNSNNPRFTSSHHPFLQPIFPPNPNLFTQQNPSSQPIFPPNPAIFSPNLSFQPEFPPPWIPLNPFSPQLYPIIPPFPPRISEQTSTKDQESPKLEHVDKPSVSNINPIKSPNPTREIEKTFQNSKRVLVVKEQPQMIYKHPYQKRSMMERIDKWRKLKGVGGFGGFSIPPYIPMAQIKFSPCEHTLSDHYKCEEERAKKKKKIASHWQRLEVLKDVSTVDKFGDLLRTAYLERGISIEPLSLDQGKAYATQEHYMLLFLKQFNIEWSKIGTFFFDRSINSLKKKYKKLKRKINRARLEGAYDASDATNFIIQWSVDDLTFSEITNINTFTSTVSITFPETWTNSDHYQKMIMKIGQLSPSKPLPLRQAQPSSNKSNVSTTPGEPYSQSEEDLIVTSLRKGMNLEQIYRDYFKHRTFQSLKNKVRRLRKRQLYHKQQPSKKRLNKRRMVPNSTVSTDSKELRKPFWHDDTVDRLNKICPVSCFAKNGLKIPTQKPPPSKKELVEKVWSKSETWKKTPCKCGNSKFKRTVCSFNGRKFGSEKKKLVQEFKEVSALEESLTMLQENGVNSSTTAENEVSSSATTVNEVNSSTTAENEVNSSTIAENGVSSSTTAENGVSSSMTAENGVNSSTTAESKEKADDTIEKLLKQIYTSFSISNEDNYFVRTKKVRLKLTSEQKKVFERFFFNSNHTYNEACLLHFMLEQNKGKTLLTTTEDDYFKILKNPQTNLRFKQTRWLWDQELKHCPADIKLNAVKDFVKAEKITRYKNKQAAEKESKEAARKAKSKFLKKVQKGKKEMITDEELNERFNPKHFTRQPREFEMKGRSNQHPYQSFKVTNISLSQEGVLLKPTFFKGNESACPSKKSTDHLLKFYYPARARKWLKEEIDNKKFSHETTFVRERGRYFVCLPVRYHKALTRQEFQRFDKSFYESNSNSGTEYDTKFLKDCPQPSQDELRKEYIALDPGVRCFMYGYDSNGDALEFAAQGENTILFSLSLKQDQLRSEIAKNKFLKYNSRQERKFYKGLRKALKKKIRRLESKIRNKVNDMHNKIIDYLTFHYSEIIIPEFNVKAMIARKQKQRKRQGKEDTTCQGQEGYTNGQTENMDVRTEPLVASSSPFEGWESRDTTTSETTTNTSEWVGRKITRKTVRQMLRFRHYDFRMKLLQKAEMRGCKVHVVTEQYTSKTCGNCSVIKEDLYGSKWFHCNHCHFHIPRDGNGARNILIKNYHHLLHW

SEQ ID NO: 3276 - protein, 972 aa, Naegleria lovaniensis
MEWSKISTFFFDRSINSLKKKYKKLKRKINRARLEGAYDVSDATNFIIQWSVDDLTFSEITDISTLTSTVSITFPETWTNSDHYHKMIMKLGQLSPSKPLPLRQAQPSSNKSNVPTTPGEPYSQSEEDLIVTSLRKGMNLEQIYRDYFKHRTFQSLKNKVRRLRKRQLYHKQQPSKKRLNKRRMVPNSTVSTDSKELRKPFWHDDTVDRLNKICPVSCFAKNGTKILTQSWFILSVRQRCPSTEPPPPSKKELVEKVWSKSETWKKTPCKCGNSKFKRTVCSFNGRKFGSEKKKLVQEFKEVSALEESLTMLQENGVNSSTTAENEVNSSTIAENGVTSSTTAENGVNSSTTAENEVSSSTTAENGVNSSTTAESKEKADDAIEKLLKQLFTSFSISNEDNYFVRTKKVRLKLTSEQKKVFERFFFNSNHAYNEACLFHFMLEQNKGKTFLTTTEDDYFKILKNPQTNLRFKQTRWLWDQELKHCPADIKLNAVKDFVKAEKITRYKNKQAAEKESKEAARKAKNKFLKEVQKGKKEMITDEELNERFNPKHFARQPCEFEMKGRSNQHPYQSFKVTNISLSQEGVLLKPTFFKGNESACPSKKSTDHLLKFYYPTRARKWLKEEIDNKKFSHETTFVRERGRYFVCLPVRYHKALTRQEYQRFDKSFYESNSNSGIEYDKIFLKDCPQPSQDELRKEYIALDPGVRCFMYGYDSNGDALEFAAQGENTILFSLSLKQDQLRSEIAKNKFLKYNSRQERKFYKGLRKALKKKIRRLESKIRNKVNDMHNKIIDYLTFHYSEIIIPEFNVKAMIARKQKQRKRQGKEDTTCQGQEGYTNDQTENMDVRTEPLVASSSPFEGWESRDTTTSETTTNTSEWVGRKITRKTVRQMLRFRHYDFRMKLLQKAEMRGCKVHVVTEQYTSKTCGNCSVIKEDLYGSKWFHCNHCHFHIPRDGNGARNILIKNYHHLLHW

SEQ ID NO: 3277 - protein, 495 aa, Naegleria lovaniensis
MKRSREDEPTHPPTNPSLAHGIIPFWDEYSQQVSDELWACSRDSFHEFNQYNNKGCTDRWFKFSQFTVIESKPVFDVPLNVHYSITENVAFDNSKKPPQLKKAKKNQKTPQKFQADKSLKIRLYPNEQERTTLNQWMGTARWIYNKCLEFTNKSKGVKKNKKNFRTFVVNNDNYQTENQWVVNTPYDVRDAAANELLTAFKTNFEKKKAGMIDKFMIRFRRKKDRKDHFVLHCKHWKKKTGLYSFIRNIKSAKPLPEELQYDSIIIKNKLNHYYLCIPQVLDIRGENQAPQHSGQVVALDPGVRTFQTTFDLNGYSTKWGSGGAERIGRLCCAYDKLQSKWSQPEVRHCKRYKYKRAGRRIQQKIRNIVDDLLKKLCLWLCRNYQVILLPSFETQKMVKKLHRRINSKTARKMLTWSHYRFKQRLLHKAREHPWTHIYIVNEAYTSKTCSCCGHVYTVGSSEVFRCPSCGSIFDRDINGARNILLRFLTTHRISF

SEQ ID NO: 3278 - protein, 895 aa, Naegleria lovaniensis
MIMKLGQLSPSKPLPLRQAQPSSNKSNVSTTPGEPYSQSEEDLIVTSLRKGMNLEQIYRDYFTHRTFQSLKNKVRRLRKRQLYHKQQPSKKRLNKRRMVPNSTVSTDSKELRKPFWHDDTVDRLNKICPVSCFAKNGTKILTQSWFTLSVRQRCPSTKPPPSKKELVEKVWSKSETWKKTPCKCGNSKFKRTVCSFNGRKFGSEKKKLVQEFKQVSALEESLTMVQENGVSSSTTAENEVSSSATAVNEVNSSTTAENEVNSSTIAENGVNSSTTAENGVSSSMTAENGVNSSTTAESKEKADDTIEKLLKQIYTSFSISNEDNYFVRTKKVRLKLTSEQKKVFERFFFNSNHAYNEACLLHFMLEQNKGKTLLTTTEDDYFKILKNPQTNLRFKQTRWLWDQELKHCPADIKLNAVKDFVKAEKITRYNNKQAAEKESKEAARKAKNQFFKDVQKGKKEMITDEEMNERFNPKHFTRQPREFEMKGRSNQHPYQSFKVTNISLSQEGVLLKPTFFKGNENACPSKKSTDHLLKFYYPARARKWLKEEIDNKKFSHETTFIRERGRYFVCLPVRYHKALTRQEYQRFDKSFYESNSNSGIEYDTKFLKDCPQPSQNELRKEYIALDPGVRCFMYGYDSNGDALEFAAQGENTILFSLSLKQDQLRSEIAKNKFLKYNSRQERKFYKGLRKALKKKIRRLESKIRNKVNDMHNKIIDYLTFHYSEIIIPEFNVKAMIARKQKQRKRQGKEDTTCQGQEGYTNGQTENMDVRTEPLVASSSPFEGWESRDTTTSETTTNTSEWVGRKITRKTVRQMLRFRHYDFRMKLLQKAEMRGCKVHVVTEQYTSKTCGNCSVIKEDLYGSKWFHCNHCHFHIPRDGNGARNILIKNYHHLLHW

SEQ ID NO: 3279 - protein, 1259 aa, Naegleria lovaniensis
MNNQSREENNSNNPRFTSSHHPFLQPIFPPNPNLFTQQNPSSQPIFPPNPAIFSPNLSFQPRFPPPWIPLNTFSPQLYPIIPPFPPRTSEQTSTKDQESPKLEHVDNTNINPIKSPNPTREIEKTFQNSKRVLAIKGQPQMICKHPYQKRSMMERIDKWRKLKGVGGFGGFSIPPYIPMAQIKFSPCEHTLSDHYKCEEERAKKKKKVASHWQRLEVLKDVSTVDKFGDLLRTAYLERGISIEPLSLDQGKAYATQEHYMLLFLKQFNLEWSKIGTFFFDRSINSLKKKYKKLKRKINRARLEGAYDASDATNFIIQWSVDDLTFSEFTDSNTFTSTVSITFPETWTNSDHYQKMIMKLGQLSPSKPLPLRQAQPSSNKSNVSTTPGEPYSQSEEDLIVTSLRKGMNLEQIYRDYFIHRTFQSLKNKVRRLKKRQLYHKQQPSKKRLNKRRMVPNSTVSTDSKELRKPFWHDDTVDRLNKTCPVSCFAKNGLKIPTQSWFTLSVRQRCPSTKPPPSKKELVEKVWCKSETWKKTPCKCGNSKFKRTVCSFNGRKFGSEKKKLVQEFKQVSALEESLTMLQENGVNSSTTAENEVSSSATAVNEVNSSTTAENEVNSSTIAENGVSSSTTAENGVNSSTIAENEVSSSTTAENGVNSSTTAESKEKADDTIEKLLKQIYTSFSISNEDNYFVRTKKVRLKLTSEQKKVFERFFFNSNHAYNEACLLHFMLEQNKGKTLLTTTEDDYFKILKNPQTNLRFKQTRWLWDQELKHCPADIKLNAVKDFVKAEKITRYKNKQAAEKESKEAARKAKTKFLKDVQKGKKEMITDEELNERFNPKHFTRQPREFEMKGRSNQHPYQSFKVRDISLSQEGVLLKPTFFKGNESACPSKKSTDHLLKFYYPARARKWLKEEIDNKKFSHETTFVRERGRYFVCLPVRYHKALTRQEFQRFDKSFYESNSNSGTEYDTKFLKDCPQPSQDELRKEYIALDPGVRCFMYGYDSNGDALEFAAQGENTILFSLSLKQDQLRSEIAKNKFLKYNSRQERKFYKGLRKALKKKIRRLESKIRNKVNDMHNKIIDYLTFHYSEIIIPEFNVKAMIARKQKQRKRQGKEDTTCQGQEGYTNGQTENMDVRTEPLVASSSPFEGWESRDTTTSETTTNTSEWVGRKITRKTVRQMLRFRHYDFRMKLLQKAEMRGCKVHVVTEQYTSKTCGNCSVIKEDLYGSKWFHCNHCHFHIPRDGNGARNILIKNYHHLLHW

SEQ ID NO: 3280 - protein, 532 aa, Naegleria lovaniensis
MLEQNKGKTLLTTTEDDYFKILKNPQTNLRFQQTRWLWDQELKHCPADIKLNAVKDFVKAEKITRYKNKQAAEKESKEAARKAKNQFLKKVQKGKKEMITDEELNERFNPKHFTRQPREFEMKGRSNQHPYQSFKVTNISLSQEGVLLKPTFFKGNESACPSKKSTDHLLKFYYPARARKWLKEEIDNKKFSHETTFVRERGRYFVCLPVRYHKALTRQEFQRFDKSFYESNSNSGIEYDKIFLKDCPQPSQNELRKEYIALDPGVRCFMYGYDSNGDALEFAAQGENTILFSLSLKQDQLRSEIAKNKFLKYNSRQERKFYKGLRKALKKKIRRLESKIRNKVNDMHNKIIDYLTFHYSEIIIPEFNVKAMIARKQKQRKRQGKEDTTCQGQEGYTNGQTENMDVRTEPLVASSSPFEGWESRDTTTSETTTNTSEWVGRKITRKTVRQMLRFRHYDFRMKLLQKAEMRGCKVHVVTEQYTSKTCGNCSVIKEDLYGSKWFHCNHCHFHIPRDGNGARNILIKNYHHLLHW

SEQ ID NO: 3281 - protein, 495 aa, Naegleria lovaniensis
MKRSREDEPTHPPTNPSLAHGIIPFWNEYSQQVSDKLWACSRDSFHEFNQYNNKGCTDGWFNFSQFTVIESKPVFDVPLNVHHSITENVAFDNSKKPPQLKKAKKNQKTPQKLQADKSLKIRLYPNEQERTTLNQWMGTARWIYNKCLEFTHNFKDVKKNKKNFRTFVVNNDNYQTENQWVVNTPYDVRDAAAIELLTAFNTNFEKKKAGMIDKFMIRFRRKKDRKDHFVLHCKHWKKKSGLYSFIRNIKSAEPLPEELQYDSIIIKNKLNHYYLCIPQVLDIRGENQAPQHSGQVVALDPGVRTFQTTFDLNGYSTKWGSGGAERIGRLCCAYDKLQSKWSQPEVRHCKRYKYKRAGRRIQQKIRNIVDDLHKKLCLWLCRNYQVILLPSFETQKMVKKLHRRINSKTARKMLTWSHYRFKQRLLHKAREHPWTHIYIVNEAYTSKTCSCCGHVYTVGSSEVFRCPSCGSIFDRDINGARNILLRFLTTHGISF

SEQ ID NO: 3282 - protein, 360 aa, Naegleria lovaniensis
MKIRIRFVDDFVKAEKITRHKNKQAAEKESKEAARKAKNKFLKDVQKGKKEITDEELNERFNPKHFARQPCEFEMKGRSNQHPYQSFKVKDISLSQEGVLLKPTFFKGNESACPSKKSKDHLLKFYYPTRARKMLKEEIGVRCFMYGYDSNEDALEFAAQEENTILFSLSLKQDQLRSEIAKNKFLKYNSRQERKFYKGLRKALKKKIRRLESKIRNKVNDMHNKIIDYLTFHYSEIIIPEFNVKAMIARKQKQRKRQGKEDTSCQGQEGYTNGQTENMDVRTEPLVASSSPFEGWESRDTTTSETTTNTSEWVGRKITRKTVRQMLRFRHYDCRMKLLQKAEMRGCKVHVITEQYTSKT

SEQ ID NO: 3283 - protein, 359 aa, Naegleria lovaniensis
MGTARWIYNKCLEFTHNFKGVKKNKKNFRTFVVNNDNYQTENQWVVNTPYDVRDAAAIELLTAFNTNFEKKKAGMIDKFMIRFRRKKDRKDHFVLHCKHWKKKSGLYSFIRNIKSAEPLPEELQYDSIIIKNKLNHYYLCIPQVLDIRGENQAPQHSGQVVGLDPGVRTFQTTFDLNGYSTKWGSGGAERIGRLCCAYDKLQSKWSQPEVRHCKRYKYKRAGRRIQQKIRNIVDDLHKKLCLWLCRNYQVILLPSFETQKMVKKLHRRINSKTARKMLTWSHYRFKQRLLHKAREHPWTHIYIVNEAYTSKTCSCCGQIYTVGSSEVFRCPSCGSIFDRDINGARNILLRFLTTHRISF

SEQ ID NO: 3284 - protein, 1219 aa, Naegleria lovaniensis
MNNQSREENNSNNPRFTSSHHPFLQPIFPPNPNLFTQQNPSSQPIFPPNPAIFSPNLSFQPGFPPPWIPLNPFSPQLYPIISPFPPRTSEQTSTKDQESPKLENVDKPSVTNINPIKSPNPTREIEKTFQNSKRVLVIKEQPQMICKHPYQKRSMMERIDKWRKLKGVGGFGGFSIPPYIPMAQIKFSPCEHTLSDHYKCEEERAKKKKKIASHWQRLEVLKDIGTFFFDRSINSLKKKYKKLKRKINRARLEGAYDASDATNFIIQWSVDDLTFSEFTDSNTFTSTVSITFPETWTNSDHFHKMIMKLGQLSPSKPLPLRQAQPSSNKSNVSTTPGEPYSQSEEDLIVTSLRKGMNLEQIYRDYFTHRTFQSLKNKVRRLRKRQLYHKQQPMKKRLNKRRMVPNSTASTDSKELRKPFWHDDTVDRWNKICPVSCFAKNGLKIPTQSWFTLSIRQRCPSTKPPPSKKELVEKVWSKSETWKKTPCKCGNSKFKRTVCSFNGRKFGSEKKKLVQEFKQVSALEESLTMLQENGVNSSTTAENEVNSSTIAVNEVSSSTTAVNEVNSSTTAENEVNSSTIAENGVNSSTTAENEVNSSTIAENGVSLSMTAENGVNSSTTAESKEKADDTIEKLLKQIYTSFSISNEDNYFVRTKKVRLKLTSEQKKVFERFFFNSNHAYNEACLLHFMLEQNKGKTLLTTTEDDYFKILKNPQTNLRFKQTRWLWDQELKHCPADIKLNAVKDFVKAEKITRHNNKQAAEKESKEAARKAKNKFFKDVQKGKKEMITDEEMNERFNPKHFTRQPREFEMKGRSNQHPYQSFKVTNISLSQEGVLLKPTFFKGNESACPSKKSKDHLLKFYYPARARKWLKEEIDNKNFSHETTFARERGRYFVCLPVRYHKALTRQEYQRFDKSFYESNSNSGIEYDRIFLKDCPQPSQNELRKEYIALDPGVRCFMYGYDSNGDALEFAAQGENTILFSLSLKQDQLRSEIAKNKFLKYNSRQERKFYKGLRKALKKKIRRLESKIRNKVNDMHNKIIDYLTFHYSEIIIPEFNVKAMIARKQKQRKRQGKEDTTCQGQEGYTNGQTENMDVRTEPLVASSSPFEGWESRDTTTSETTTNTSEWVGRKITRKTVRQMLRFRHYDFRMKLLQKAEMRGCKVHVVTEQYTSKTCGNCSVIKEDLYGSKWFHCNHCHFHIPRDGNGARNILIKNYHHLLHW

SEQ ID NO: 3285 - protein, 1006 aa, Naegleria lovaniensis
MFIAHVQEIVELIFSFLEESDRKRSEQVSLTFHEACNAVEEREMVWRLQFEEKALHNSIHKGLCHDDSKHSYAHHVELIMKQLDDFEKKQLNFKIPFHVRMYMKHSKIYPSNDAIPYIPKLNNAILHPFMCIFKISQWQVRDRDCVVIGEYQTRKIDKYLVLLKNSGGKGVLEVERHFELEYHHLDSENFVSQLILQVSRMETFVVGSLTRWLSNFGYLKDQNKCSVVTQLKTSYPNALIYDEDILSDNPKFCLEYFVANFKQGYVYMYFYNLLKERQYRALLKHKIITLEDLPAHIRNDEKVISFSVATNGINLKHLTRAHHNDRDLVLEAVKENGLALAFASKTLKNLDPFIFSQANQNNQLVQYFSDRVGEETKLGVKPTTLGIAENDDFIDQFKENLQRGIYGWGIEHLTQFQRDIIQSICDQKNRNILIEGPCASGKTIASIIGVLNKGLDDSSTAPPDQVQCLIICPTKEMVYQIQLFFTSLCEYMSDISIGNSTCGWTTFYSAEFAKSYRVLIGTPGRIAHKSKYYLELSHVKTVIFEGSDQLLAGEFGNELNLIFKKLSNNCQSILISSLFSPKLIMRIAKIFTNENFKVLRVPLLPSNQPHKYQFLELTNEEEKWTLIKEIIQDHSNMLTMVFCNSRRKAEMLCEELNNVGFCCNVLHGDIDCQQRELILNDFRKGAFRPVFDVPPNIHHSITENVAFDNSKKPPQLKKAKKNQKTPQKLQADKSMKIHLYPNEQERTTLNQWMGTARWIYNKRLEFTHNFKDVKKNKKNFRTFVVNNDNYQTENQGENQAPQHSGQVVALDPGVRTFQTTFDLNGYSTKWGSGGAERIGRLCCAYDKLQSKWSQPEVRHCKRYKYKRAGRRIQQKIRNIVDDLHKKLCLWLCRNYQVILLPSFETQKMVKKLHRRINSKTARKMLTWSHYRFKQRLLHKAREYPWTHIYIVNEAYTSKTCSCCGHIHTVGSSEVFRCPSCGSIFDRDINAARNILLRFLTTHRISF

SEQ ID NO: 3286 - protein, 495 aa, Naegleria lovaniensis
MKRSREDEPTHPPTNPSLAHGIIPFWDEYSQQVSDKLWACSRDSFHEFNQYNNKGCTDGWFNFSQFTVIESKPVFDVPLSVHHSITENVAFDNSKKPPQLKKAKKNQKVAQKFQADKSLKIRLYPKEQERTTLNQWMGTARWIYNKCLEFTHNFKGVKKNKKNFRTVVVNNDNYQTENQWVVNTPYDVRDAAAIELLTAFKTNFEKKKAGTIDKFMIRLRRKKDRKDHFVLHCKHWKKKNGLYSFIRNIKSAEPLLEELQYDSIIIKNKLNRYYLCIPQVLEIRGENQAPQHSGQVVALDPGVRTFQTTFDLNGYSTKWGSGGAERIGRLCCAYDKLQSKWSQPEVRHCKRYKYKRAGRRIQQKIRNIVDDLHKKLCLWLCRNYQVILLPSFETQKMVKKLHRRINSKTARKMLTWSHYRFKQRLLHKAREHPWTHIYIVNEAYTSKTCSCCGHVYTVGLSEVFRCPSCGSIFDRDINGARNILLRFLTTHRISF

SEQ ID NO: 3287 - protein, 359 aa, Naegleria lovaniensis
MGTARWIYNKCLEFTNKSKGVKKNKKNFRTFVVNNDNYQTENQWVVNTPYDVRDAAAIELLTAFNTNFEKKKAGTIDKFMIRFRRKKDRKDHFVLHCKHWKKKSGMYSFIRNIKSAEPLPEELQYDSIIIKNKLNHYYLCIPQVLDIRGENQAPQHSGQVVALDPGVRTFQTTFDLNGYSTKWGSGGAERIGRLCCAYDKLQSKWSQPEVRHCKRYKYKRAGRRIQQKIRNIVDDLHKKLCLWLCRNYQVILLPSFETQKMVKKLHKRINSKTARKMLTWSHYRFKQRLLHKAREHPWTHIYIVNEAYTSKTCSCCGHVYTVGSSEVFRCPSCGSIFDRDINGARNILLRFLTTHRISF

SEQ ID NO: 3288 - protein, 477 aa, Naegleria lovaniensis
MNLLILLLIHLLHTASFHSWACSRDSFHEFNQYNNKGCTDGWFNFSQFTVIESQPVFDVPLNVHHSITENVAFDNSKKPPQLKKAKKGQKTPQKFQADKSMKIRLYPNEQERTTLNQWMGTARWIYNKCLEFTNKSKGVKKNKKNFRTFVVNNDNYQTENQWVVNTPYDVRDAAAIELLTAFNTNFEKKKAGTIDKFMIRFRRKKDRKDHFVLRCKHWKKKSGMYSFIRNIKSAEPLPEELQYDSIIIKNKLNHYYLCIPQVLDIRGENQAPQHSGQVVALDPGVRTFQTTFDLNGYSTKWGSGGAERIGRLCCAYDKLQSKWSQPEVRHCKRYKYKRAGRRIQQKIRNIVDDLHKKLCLWLCRNYQVILLPSFETQKMVKKLHRRINSKTARKMLTWSHYRFKQRLLHKAREHPWTHIYIVNEAYTSKTCSCCGHVYTVGSSEVFRCPSCGSIFDRDINGARNILLRFLTTHRISF

SEQ ID NO: 3289 - protein, 1248 aa, Naegleria lovaniensis
MNNQSREENNSNNPRFTSSHHPFLQPIFPPNPNLFTQQNPSSQPIFPPNPAIFSPNLSFQPGFPPPWIPLNPFSPQLYPIIPPFPPRISEQTSTKDQESPKLEHVDKSINPLKSPNPTREIEKTFQNSKRVLAIKEQPQMIYKHPYQKRSMMERIDKWRKLKGVGGFGGFFIPPYIPMAQIKFSPCDHTLSDHYKCEEERAKKKKKVASHWQRLEVLKDVSTVDKFGDLLRTAYLERGISIEPLSLDQGKAYATQEHYMLLFLKQFNMEWSKIGTFFFDRSINWLKKKYKKLKRKINRARLEGAYDASYATNFIIQWSVDDLTFSEFTNSNTFTSTVSITFPETWTNSDHYQKMIMKLGQLSPSKPLPLRQAQPSSNKSNVSTTPGEPYSQSEEDLIVTSLRKGMNLEQIYRDYFTHRTFQSLKNKVRRLRKRQLYHKQQPTKKRLNKRRMVPKTTASTDSRELRKPFWHDDTVDRLNKTCPVSCFAKNGTKIPTQSWFTLSVRQRCPSTKPPPSKKELVEKVWSKSETWKKTPCKCGNSKVKRTVCSFNGRKFGSEKKKLVQEFKEVSALEESLTMLQENEVSSSTTAENEVSSSVTAVNEVNSSTTAENEVNSSMTAENGVNSSTTAENEVSSSMTAENGVNSSTTAESKEKADDTIEKLLKQIYTSFSISNEDNYFVRTKKVRLKLTSEQKKVFERFFFNSNHAYNEACLLYFMLEQNKGKTLLTTTEDDYFKILKNPQTNLRFKQTRWLWDQELKHCPADIKLNAVKDFVKAEKITRYKNKQAAEKESKEAARKAKNQFFKDVQKGKKEMITDEEMNERFNPKHFTRQPREFEMKGRSNQHPYQSFKVTNISLSQEGVLLKPTFFKGNESACPSKKSTDHLLKFYYPARARKWLKEEIDNKKFSHETTFVRERGRYFVCLPVRYHKALTRQEYQRFDKSFYESNSNSGIEYDTIFLKNCPQPSQDELRKEYIALDPGVRCFMYGYDSNGDALEFAAQGENTILFSLSLKQDQLRSEIAKNKFLKYNSRQERKFYKGLRKALKKKIRRLESKIRNKVNDMHNKIIDYLTFHYSEIIIPEFNVKAMIARKQKQRKRQGKEDTTCQGQEGYTNGQTENMDVRTEPLVASSSPFEGWESRDTTTSETTTNTSERVGRKITRKTVRQMLRFRHYDFRMKLLQKAEMRGCKVHVVTEQYTSKTCGKCSVIKEDLYGSKWFHCNHCHFHIPRDGNGARNILIKNYHHLLHW

SEQ ID NO: 3290 - protein, 495 aa, Naegleria lovaniensis
MKRSREDEPTHPPTNPSLAHGIIPFWDEYSQQVSDKLWACSRDSFHEFNQYNNKGCTDGWFNFSQFTVIESKPVFDVPLNVHHSITENVAFDNSKKPPQLKKAKKNQKVAQKFQADKSLKIRLYPNEQERTTLNQWMGTARWIYNKCLEFTNKSKGVKKNKKNFRTFVVNNDNYQTENQWVVNTPYDVRDAAAIELLTAFNTNFEKKKAGTIDKFMIRFRRKKDRKDHFVLHCKHWKKKSGLYSFIRNIKSSEPLPEELQYDSIIIKNKLNHYYLCIPQVLDIRGENQAPQHSGQVVALDPGVRTFQTTFDLNGYSTKWGSGGAERIGRLCCAYDKLQSKWSQPEVRHCKRYKYKRAGRRIQQKIRNIVDDLHKKLCLWLCRNYQVILLPSFETQKMVKKLHRRINSKTARKMLTWSHYRFKQRLLHKAREHPWTHIYIVNEAYTSKTCSCCGHIYTVGSSEVFRCPSCGSIFDRDINAARNILLRFLTTHRISF

SEQ ID NO: 3291 - protein, 1242 aa, Naegleria lovaniensis
MNNQSREENNSNNPRFTSSHHPFLQPIFPPNPNLFTQQNPSSQPIFPPNPAIFSPNLSFQPGFPPPWIPLNPFSPQLYPIIPPFPPRTSEQTSTKDQKSPKLEHVDKSSVTNINPIKSPNPTREIEKTFQNSKRVLAIKEQPQMIYKHPYQKRSMMERIDKWRKLKGVGGFGGFSIPPYIPMAQIKFSPCEHTLSDHYKCEEERAKKKKKIASHWQRLEVLKDVSTVDKFGDLLRTAYLERGISIEPLSLDQGKAYATQEHYMLLFLKQFNMEWSKIGTFFFDRSINSLKKKYKKLKRKINRARLEGAYDASDATNFIIQWSVDDLTFSEITNISTLTSTVSITFPETWTNSDLFHKMIMKLGQLSPSKPLPLRQAQPSSNKSNVPTTPGEPYSQSEEDLIVTSLRKGMNLEQIYRDYFTHRTFQSLKNKVRRLRKRQLYHKQQPTKKRLNKRRMVPNSTVSTDSKELRKPFWHDDTVDRLNKICPVSCFTKNGLKIPTQSWFTLSVRQRCPSTKPPPSKKELVEKVWSKLETWKKTPCKCGNSKFKRTVCSFNGRKFGLEKKKLVQEFKEVSALEESLIMLQENEVSSSTTAENEVSSSATAVNEVNSSTTAENEVNSSTIAENGVSSSTTAENGVNSSTTAESKEKADDTIEKLLKQIYTSFSISNEDNYFVRTKKVRLKLTSEQKKVFERFFFNSNHAYNEACLLYFMLEQNKGKTLLTTTEDDYFKILKNPQTNLRFKQTRWLWDQELKHCPADIKLNAVKDFVKAEKITRYKNKQAAEKESKEAARKAKNQFFKDVQKGKKEMITDEELNERFNPKHFTRQPREFEMKGRSNQHPYQSFKVRDISLSQEGVLLKPTFFKGKENACPSKKSKDHLLKFYYPARARKWLKEEIDNKKFSHETTFIRERGRYFVCLPVRYHKALTRQEYQRFDKSFYESNSNSGIEYDKIFLKGCPQPSQDELRKEYIALDPGVRCFMYGYDSNGDALEFAAQGENTILFSLSLKQDQLRSEIAKNKFLKYNSRQERKFYKGLRKALKKKIRRLESKIRNKVNDMHNKIIDYLTFHYSEIIIPEFNVKAMIARKQKQRKRQGKEDTTCQGQEGYTNGQTENMDVRTEPLVASSSPFEGWESRDTTTSETTTNTSEWVGRKITRKTVRQMLRFRHYDFRMKLLQKAEMRGCKVHVVTEQYTSKTCGNCSVIKEDLYGSKWFHCNHCHFHIPRDGNGARNILIKNYHHLLHW

SEQ ID NO: 3292 - protein, 1262 aa, Naegleria lovaniensis
MNNQSREENNSNNPRFTSSHHPFLQPIFPPNPNLFTQQNPSSQPIFPPNPAIFSPNLSFHPEFPPPWIPLNPFSPQLYPIIPPFPPRISEQTSTKDQESPKLEHVDKPSVTNINPIKSPNPTREIEKTFQNSKRVLAIKGQPQMICKHPYQKRSMMERIDKWRKLKGVGGFGGFSIPPYIPMAQIKFSPCEHTLSDHYKCEEERAKKKKKIASHWQRLEVLKDVSTVDKFGDLLRTAYLERGINIEPLSLDQGKAYATQEHYMLLFLKQFNMEWSKIGTFFFDRSINSLKKKYKKLKRKINRARLEGAYDASDATNFIIQWSVDDLTFSEFTDISTLTSTVSITFPETWTNSDLFHKMIMKIGQLSPSKPLPLRQAQPSSNKSNVPTTPGEPYSQSEEDLIVTSLRKGMNLEQIYRDYFTHRTFQSLKNKVRRLRKRQLYHKQQPTKKRLNKRRMVPNSTVSTDSKELRKPFWHDDTVDRLNKTCPVSCFAKNGTKILTQSWFTLSVRQRCPSTKPPPSKKELVEKVWCKSETWKKTPCKCGNSKFKRTVCSFNGRKFGSEKKKLVQEFKQVSALEESLTMLQENEVSSSTTAENEVSSSVTAVNEVNSSTTAENEVNSSTIAENGVSSSTTTENGVNSSTTAENGVSSSTTAENGVNSSTTAESKEKTDDTIEKLLKQIYTSFSISNEDNYFVRTKKVRLKLTSEQKKVFERFFFNSNHAYNEACLLHFMLEQNKGKTLLTTTEDDYFKILKNPQTNLRFKQTRWLWDQELKHCPADIKLNAVKDFVKAEKITRYKNKQAAEKESKEAARKAKNQFFKDVQKGKKEMITDEELNERFNPKHFTRQPCEFEMKGRSNQHPYQSFKVTNISLSQEGVLLKPTFFKGNENACPSKKSMDHLLKFYYPARARKWLKEEIDNKKFSHETTFIRERGRYFVCLPVRYHKALTRQEFQRFDKSFYESNSNSGTEYDTKFLKDCPQPSQNELRKEYIALDPGVRCFMYGYDSNGDALEFAAQGENTILFSLSLKQDQLRSEIAKNKFLKYNSRQERKFYKGLRKALKKKIRRLESKIRNKVNDMHNKIIDYLTFHYSEIIIPEFNVKAMIARKQKQRKRQGKEDTTCQGQEGYTNGQTENMDVRTEPLVASSSPFEGWESRDTTTSETTTNTSEWVGRKITRKTVRQMLRFRHYDFRMKLLQKAEMRGCKVHVVTEQYTSKTCGNCSVIKEDLYGSKWFHCNHCHFHIPRDGNGARNILIKNYHHLLHW

SEQ ID NO: 3293 - protein, 301 aa, Morchella importuna
MKRTLASAKSSLYTLNKTSRATGATSTTTTSLNTSPPGKAAKEDYIERMNLLPAIMEHLSSCQKVIFFRNRPSINHFQALTDSSDGAPYAFDVDLLPKPYEITAAKKLAKEKREREVRMKRVYGKITAQERRHIRAHAQLPPDAPKPVLIHCVGHWQGINSCIKGHSRREMKQIREQHRVYGNVAITNEYNSSKTCPLCSSKVHLARRTVDGKERVVRLHGAVECVHPRCPARRIPHTTRGRDANAAANIALSGASIILSSDQQPLPPFRRDTNNTRYNLAKELLTVMTPGLVPRDSIRDE

SEQ ID NO: 3294 - protein, 610 aa, Contarinia nasturtii
MKRKRDNNDSPVYDDEKEEENNFVAIKCGLQTILRPEHAAVVTQILFERSLQMTEVASLASLLILFKVNEALDNEDRQFFLRRDRRQFFFDCFNAVLAENVHNNNSRNPIPPEFRFMVENFSDEQFEWPSKEKLKNGFRYFVKQHITNTKTGLTTWCEDRLESFFRMRCWYRNHNIYGPRFDGIDIRNAKMLAYRSNDLTNGNVERIEKANILLDDLVAIGWRREKCMKFFVKDHWFESLWLFGQIQRQIAAYHSDAAQWNTIHEIFRNNPNFQQPTNNRPRKINSFALVPLCDYHLKCVRLDMRDLYKKLASKLKVVPRFLNTDTNRLNKYPEKYYRDHDRDGLWNLLFDVDKINQLGKRFKQFHHQIVTNSVSVSALYTKPERACNENVHTHADNLVGKKYVIGIDPNEKTWLAITRRNIRKTPDEPAVEENITIPNTRFYWETQQKRREKEAKKLAGWFDIEEKNHLKTYPFGPPSPRNSTWKGYIEYRIKMLRKGMSAYATRKYSRLDFDHYMKSNQVNDNIAVTVTNNEPSIIIFGASEMPPNRPFGLKRRKRCPGSRKFLVSVKKLGHSVVKMEDEWGTSQTCANCQERFPANTKPKGQITTRT

SEQ ID NO: 3295 - protein, 259 aa, Contarinia nasturtii
MDFKSYPVIPSPRGSTWKAYILHRIKILRMGMQAYATRKYARLDLDHHIKATKTSDKVAMRVTNNKPSWIWIGAGEMAPNRPWGIKKRKRCPGTRKLATSFKKQEHTKVSFQDEWGTSITCANCHERFPRETKNHRFKICRNCIPKPIVGLPPIIVTNLSRQELKKERIVERAINPDRENIERLVPKIKVIFKTWSLTREYHELGDAAPEDMIEHVVIWHRDIVAAKNILFKGMCRLFGIPLPDSLKRPDNPHHANNVN

SEQ ID NO: 3296 - protein, 767 aa, Contarinia nasturtii
MRLTTIVRPEYHDVVIHWIEKKSVMSTKISVLASLLFLDKVKSAQSNRQWDFFTNKMYVVKGKLVEKNRAEDVIERCFYAVLQKNKENEDMEPHIRHFVEQGLSRDNQFAWPNNNYFGNIMKSLCQSYTRQLKTNQTTHAKKRLRNYLQMRAWQFNAVSTGLRFDKKDVDNAIDWAIRRYDAIRDTHQNAPLKRYKRKLLLDMVRAIVEEVGGLANYDNIKQFSKGKYWFKATAMWLVMQSEIDEFHNWAQDNNVTIPKIKNLSVVPLPDYQRKAVFMCNDVFYRMLAEEKLLPKVEGKQVTENFIRENKEHFWNQIFDFDKINRILKKNKEFHFTIVSNGESVSVMYKLSKQHLQRLLDDDIVRKRYLDGTFVYELGIDPGMKTWNATVRRTISTRKEVNLKTSSKKYHWLTKYKMRDKKAKRWTKQFTLDEQNDRNNRQLYQRMPSPLGTLWTDYICHRIKMLKKGMDVYTTPKYARLKFDKYVESNSTIDKLCGTLVNHQAALIHSPNSPIRIKKHVRCPGTRKLLKGFRKRGNCVVRKVDEYFTSQTCAKCGGRFDPNTKSNRFKVCENCAPVPNSIMANFLPSKIMAQLSKRRLKYNKVYIEESLVVFLARGEMTEHDFDIIADRLLSKVAVYPKKWQVNAVSGVLEYADVKVDQQPHAVDDENAAEIDGEVAQQPCTVDDDCVTEIDDKQQPMIVHQTTWDRNIVAAKCILIKGMYIRNGHLHIIDVLCLYIGHCNLFGLDIPLTLHRPRRQQAVQNNQQP

SEQ ID NO: 3297 - protein, 686 aa, Contarinia nasturtii
MTRCYILGALNLHYFTSDHFKRSTDEQIEAFYTQFVDNFFFRDWFYGVQFIEHAFNDARESGYRLCYGIWYYCQKYGVRAPVIGGFGNVVEYAVQMFYTNYKNNICMHAHSRIRKFFTHQNASKAQIDDTMDFLFKQNSNCVPDLDLMWELENTLKPIRFDDGKGYFFAMESNWFKYIPIFLNLQQYIRNHERERKAALKRGERTELREYRNFTVVPTSSFERHYIRIDRRVFYRMLRQIECPHRLFRNKNGGPKQEEDIKNKEWDVLWRLYFDIDSIEREPRNKNDGHATIKFDNSIQTDGVGMSFLMERTKFIIEKDDEERMKETQEMLLKSQQVYGLDPGLRLVIGGVRINNFNDRNNRTETIIRLTSGQYQDMINSSRRNKWRKKLTTEIDEKMRLHRESFDEQPGPRAEDHKSYADHILRHFEEKFTAYTQYEYALQAFLQYIDTNRALDAYATKLIDGKQTFIFVGDRFIAADSPARGYIRSKVRDLFEKLKRRRKCTVVEADEFRTTKLCSLCFRELEKPTKRGKVKEKYRYLTCHGCEPLCGENVLGKAQGPIESRKSNRKLTQQRKHRPRTDGPRMASKFRKYEEKTQIGRTITWNRDANAGRNILYKGWCAVMNIELHPAFQRNVEEEEENAGEGDPPPAPPARARQSRRAASNQNQQTTQRTLRSHLDQARSSRP

SEQ ID NO: 3298 - protein, 770 aa, Contarinia nasturtii
MKRRRAKINSAFKKNTAKLNDNEELRSIKLSAPSVFKSEYSEALTEHFFHKCYNGTVICYLGSTLFLYVVNLAADNDDRQYFIDSDGKNVIRECFAAVSRENLENPKQPKIPRGFLEMIADDQFEWPSRYQMGNAFEYLNQQYLSNVTTNLTTHLDNILESFLQMIRYQLNEDPNRLIKFDGIDIRNAKNNLMFNQDCTGGDQHRTNKMNELYEQVAVRCLPSFRERLSMIEYIEKKWFESLFFFIFIQREISIFLEEHHDLVQLWLRHQRHPLFYCKPSKPLPPKIRNFTVIPICDSQLKHIKFDQVDLMSLLAQWKVVPKIFNNDDGGHNMYSRNYYKENEDEAWAILFNMDKINEIKKPNQNFHHMIVCDSVSASVLYRTPKPEIENTELHRQRIKQKLENNEYKYIVAIDPGMKTYLAGIRRNIEDRTEENFKISSKSYHWGAGQKVRDKMGKLMTARFTQREQLDRESYPSIPSPRGIRWRNYVRHRLTMVKDAVAAYARRRYARLSFDKYIGSQGEKDWLAKVITKNEPSLINIGAVDMAPNSPIGIKKGKRCPGTRNLQCSVKKLGHSDVHKVNEDFTSQHCANCQKKFPIQTQKYRFKVCRNCTRDAPIPQEIEPYISLPRLIVTKKSQRRKKKDSCVKKLIARGIMDPANQPAEFQPGRLESKKMYFLKNWLLNPVNAIQMGGDADKYPEQQQQQQHQKRFCTVWHRDIVAARCIMYKGLCYIFNLEMHNSYVRAPAPPRPPLRRGQPARRRANANVVPDQ

SEQ ID NO: 3299 - protein, 741 aa, Contarinia nasturtii
MSGRKRNHESAFKPRKKIKIKEHQTIKKSARKGLKVNLPINTGKFAQLIDVYVLEMTRCYILGALNLHYFTSDHFKRSTDEQIEAFYTQFVDKNLFRDWFYGVQFIEHAFNDARESGYRLYYGIWYYCQKYGVRAPVIGGFGNVVEYAVQMFYTNYKNNICMHAHSRIRKFFTHQNASKAQIDDTMDFLFKRNSNCVPDLNLMWELENTSKPIRFDDGKGYFFAMESNWFKYIPIFLNLQQYIRNHERERKAALKRGERTELREYRNFTVLPTSSFERHYIRIDRRVFYRMLRQIECPHRLFRNKNGGPKQEEDIKNKEWDVLWRLYFDIDSIEREPRNKNDGHATIKFDNSIQTDGVGMSFLMERTKFIIEKDDEERMKETQEMLLKSQQVYGLDPGLRLVIGGVRINNFNDRNNRTETIIRLTSGQYQDMINSSRRNKWRKKLTIEIDEKMRLHRESFDEQPGSRAEDHKSYADHILRHFEEEFTAYTQYEYALQAFLQYIDTNRALDAYATKLIDGKQTFIFVGDRFIAADSPARGYIRSKVRDLFEKLKRRRKYTVVEVDEFRTTKLCSLCFRELEKPTKRGKVKEKYRYLTCHGCEPLCGENVLGKAQGPIESRKSNRKLTQQRKHRPRTEGPRMASKFSKYEEKTRIGRTITWNRDANAGRNILYKGWCAVMNIELHPAFQRNVEEEEENAGEGDPPPAPPARARQSRRAASNQNQQTTQRTLRSHLDQARSSRP

SEQ ID NO: 3300 - protein, 773 aa, Contarinia nasturtii
MKRKKEGEYENTQNRTVKQTLNTILRPKFRKSFRILVFTWCLAATRISTLASLLLLYYANKAIDQDECDENTDFFDGNGKEVIYNYFHDVLYGNHQNLPFEFLSIVRRACPRFIWPHRHGIGNAFNAIVDQYIKNVQTNLNTWCKSHIKKFFTMKQYELNRMLRIHSTDEQLITDKDVNHAVSAVVHQYYARTTGIRTHNMYILIAEAEKIGVPVNQKLKKYVEENWFASLRFFLKIQRAIDEFHRNNNYLCSLWEKYRNNRNLPKPSEPAPPKIGNFNAIPICDNQLKHISIDHTQFYFMACKIGALKRRKGKHGKINISYAEYKENPFSCWNYVFDMYKIKKLGKGKEFEFLALTDNVAVSLVYIEPIKPESIGLSWERIRHMFEVLKCFVYEIGIDPGFRTWNATVRRHIETDTEENITVDAREYHWLARYNQREKKGKRYRKEFQEEERAHMESFIFMPSPKGKFVWKFYIETRVAMMDKALAVYSQRKYVRLKFDHYSDSVHASDETAKMLTNGKPTMAYIGASGSAANSPIGIKKRQRCPGTRKLVASFKKLGNVVIKFIDEWNTSQHCAKCINRFDPRTKSHRSKVCHNCLQTGYQVRDGVMILPKVIITKMSKRQMQRLRKRKRLEQAAQPNNVVQPIVAYPNPPQPRLVPKIVVLFKMELNDAGEWVYVAMQTKTVWDRDIVAAKCIMYKGHCEVFGEEIHPSLKRPRPPPHVQLPDEPADEDDNWYDEWFYENYDEWYNVADNGEGIWEEDQFGNIIVHVLDN

SEQ ID NO: 3301 - protein, 789 aa, Contarinia nasturtii
MSTTGETTAATAPRKKRYKFQTNAQKEKDADDDVNDNGLFAIKMRLNTILRPEFNHIVKPWIEQKSIMSTKITVLASLLFLDKVKSAQMNRQWEFFKNRTYPAKKGKKKGQLVEKNRGEEVIEQCFYAVLQKNKEGENMEPHFRQFVEELSPENNFAWPKNDYFGNHFKTLCQNHTRCLKTGQKTHCKKKLKNYLRMRAWQFNAVSTGWKFDKKDIDNAVDLMIRGYNAIRDTHQNADFKRHKRTLLTGMVTAIVREVGGPTNDHNIKDFSKGDYWFKATAMWLVMQTEIDEWHNWAQDNNVKIPNIKNLSVVPLPDYQRKAVFMCNDVFYRMLAESKQLPQVDGRQATESYIRQNKEFYWNQVFDLTTINRKLKKNKEFHYTIVSNGESVSIMYRMSKQYEQQMQNDDILRKQFIGGKFAYELGIDPGMKTWNATVRRNIETKKEVNLKTSSKKYHWLAKQKTRDVKAKRWTKQFTQEEQDDRNNRQLYQRMPSPLGILWIDYVHHRIKMLKKGMAVYTTPKYTLLQFDKYVESNRTVDKLTGNLVNHKAAIIHMGNAEISPNSCIRIKKHVRAPGTRKLLKGFRKRRNCRVRKTDEWGTSQHCAKCGRRFNPATRSHRFKVCENCGAEPDSIFAEYLPSKIVAQRSKRQLRYNKDEVELYLMRFWAEGLMTEQEFDIAAERLLSKVAVYPKNWQVNTVSGKLEYAQVNADAPYATVQQPYAVDDENELEIEDEQLLMAVHKTSWDRDIVAAKCILIKGHCELFGWDIPAGLERRSPRQPAVQPNQQP

SEQ ID NO: 3302 - protein, 545 aa, Contarinia nasturtii
MVNDLNVFPEIDLHDLTTDEKHWFKAMPMFLSMQREIEEYNLEWPYQHRSKRKKRKRKKSKRRPKRKQMLDDPNFRPFIRNLVVVPMCDFRRKHYKIDCSSMHQVLSSQELLPKVEVENKNGTTSMVILPQKDFNAARDHWWNQYFYMRKIRRFVRGKKKFDFSINTDGIAVSLQYSAKKKTNSTEYDRSRIVEMILDGKFENFAGVDTGLKSWNTTVTHNIITGTETNFVMSSKQFHWKTGQNVRNAKAKRWTKKFTEEERRDRENRELYPVMPSPKGSHWLDYIKHRIKMMKHGICAYSTAKYTRLALDKHIKSSSVVDNWVEKVTDKQPTLFLFGADGEVPPDSRISIKKHVRCPGVRLTLRSIKKRRDCAIELVDEWGSSQTDARCMKRFQNQPKSARFKKCRCIPDARTLLPIKIVSKLGKKDLSEFRLLQRAMNEALEENEPLLSKVKSYYKNWQLNLECSVTWHRDVVAAKNILLKGLWTLLGLPIPDAINRYKARDAVAEAAEVAADVAEAAAAAAANVDNDVEMFEYDQQPADHAV

SEQ ID NO: 3303 - protein, 722 aa, Contarinia nasturtii
MSTKITVLASLLFLDKVKSAQMNRQWEFFKNRTYPAKKGKKKGQLVEKNRGEEVIEQCFYAVLQKNKEGENMEPHFRQFVEELSPENNFAWPKNDYFGNHFKTLCQNHTRCLKTGQTTHCKKKLKNYLRMRAWQFNAVSTGWKFDKKDIDNAVDLMIRGYNAIRDTHQNADFKRHKRTLLTGMVTAIVREVGGPTNDHNIKDFSKGDYWFKATAMWLVMQTEIDEWHNWAQDNNVKIPNIKNLSVVPLPDYQRKAVFMCNDVFYRMLAESKQLPQVDGRQATESYIRQNKEFYWNQVFDLTTINRKLKKNKEFHYTIVSNGESVSIMYRMSKQYEQQMQNDDILRKQFIGGKFAYELGIDPGMKTWNATVRRNIETKKEVNMKTSSKKYHWLAKQKTRDVKAKRWTKQFTQEEQDDRNNRQLYQRMPSPLGILWIDYVHHRIKMLKKGMAVYTTPKYTLLQFDKYVESNRTVDKLTGNLVNHKAAIIHMGNAEISPNSCIRIKKHVRAPGTRKLLKGFRKRRNCRVRKTDEWGTSQHCAKCGRRFNPATRSHRFKVCENCGAEPDSIFAEYLPSKIVAQRSKRQLRYNKDVVELYLMRFWAEGLMTEQEFDIAAERLLSKVAVYPKNWQVNTVSGKLEYAQVNADAPYATVQQPYAVDDENELEIKDEQLLMAVHKTSWDRDIVAAKCILIKGHCELFGWDIPAGLDRRSPRQPAVQPNQQP

SEQ ID NO: 3304 - protein, 763 aa, Contarinia nasturtii
MDDDELDDNQPEESKYVVIKCGLQTILRQQHERIERVGEVVTKMLFERSVQMTEVAALASLSILFILNEALDNDDRAFFLKPHPSLFIADCFRAVLNQHVNNINSQYRILPEFRFMVERNSEEQFRWPDDEKLGNGLRYFYKQYITNIQTNTNTWCEKRLENFFRMRCWYRNRFHNGSRFDNIDIRNAKEFSYRFKNLTNGNNVDPQRVEKFNILMRDLTEIGWSGTVSMKFFAKYRWFESLWLFGQMQRQIEVYHSHAEQWYTIHEMFRNNPNFQEPTINRPPKISSFALIPLCDYHLKNVRLDIKDLYYKIVNELDLVPSFLNTQTNRMNKRNLKYYTQTDRSGLWNMLFDVGKINKLGKSKPFHHQILTDSVSISIMYKKPQRQQRPQRQQRPQQTTQANRGPEKLIGKKYIIGIDPNEKSWLTVVRRNIQKTPDEPAVEENIIIPNQRFHWETQQKKRDKEAKKLAGWFDIEEKEHLKTYPYRPPSPRNSTWKSYIEYRIKMLRKGMAAYATREYARLDLDHHIRSTRVNDQIAVRVTNNKPSLVQFGAWAMKPDRPFGIKKRKRCPGSRKFRVSIKKLGHSEVEMQDEWGTSQTCANCQERFPRHTKDDRFKVCYDCRAKKIDGLPDSVAGLPDIIVSTVNRRVLRRKRAIIKRQIIDGNREAVNEKIRTGRLMSKVKVTYKNWPLNVDDDDVVPQTVTWHRDIVAAKCIMLKGMNQLETEYSLFNVFALNYIGLCRIFDVPLPVSLLRPPDYNNNVN

SEQ ID NO: 3305 - protein, 315 aa, Contarinia nasturtii
MGKRMTARFTQREQLDRESYPSIPSPRGIRWRNYVRHRLTMVKDAVAAYARRRYARLSFDKYIGSQGEKDWLAKVITKNEPSLINIGAVDMAPNSPIGIKKGKRCPGTRHLQCSVKKLGHSDVHKVNEDFTSQHCANCQKKFPIQTQKYRFKVCHCTRDAPIPQEIEPYISLPRLIVTKKSRRRKKKDSCVKKLIARGIMDPANQPAEFQPGRLESKKMYFLKNWLLNPVNAIQMGGDADKYPEQQQQQQHQKRFCTVWHRDIVAARCIMYKGLCYIFNLEMHNSYVRAPAPPRPPLRRTQPARRRANANVVPDQ

SEQ ID NO: 3306 - protein, 798 aa, Contarinia nasturtii
MSTTGETSAAQAKKKRYKYQTKKQQEEEAEDENFNDNGLLAIKMRLTTIVRPEYHDVVIHWIEKKSVMSTKISVLASLLFLDKVKSAQNNRQWDFFTNRMYVNQKQKLVEKNRAEDVIERCFYAVLQKNKENEDMEPHIRHFVEQGLSRDNQFAWPNNNYFGNIMKSLCQSYTRQLKTNQTTHAKKRLRNYLQMRAWQFNAVSTGLRFDKKDVDNAIDWAIRRYDAIRDTHQNAPLKRYKRKLLLDMVRAIVEEVGGLANYDNIKQFSKGKYWFKATAMWLVMQSEIDEFHNWAQDNNVTIPKIKNLSVVPLPDYQRKAVFMCNDVFYRMLAEEKLLPKVEGKQVTETFIRENKEHFWNQIFDFDKINRILKKNKEFHYTIVSNGESVSVLYKLSKQHLQRLLDDDIVRKRYLDGTFVYELGIDPGMKTWNATVRRTISTRKEVNLKTSSKKYHWLTKYKIRDKKAKRWTKQFTLDEQNDRNNRQLYQRMPSPLGTLWTDYICHRIKMLKKGMDVYTTPKYARLKFDKYVESNSTIDKLCGTLVNHQAALIHLGNADMSPNSPIRIKKHVRCPGTRKLLKGFRKRGNCVVRKVDEYFTSQTCAKCGGRFDPNTKSNRFKVCENCAPVPNSIMANFLPSKIVAQLSKRRLKYNKVYIEESLAVFLARGEMTEHDFDIIADRLLSKVAVYPKKWQVNAVSGVLEYADVKVDQQPHAVDDENAAEIDGEVAQQPCAVDDECVTEIDDKQQPMIVHQTTWDRDIVAAKCILIKGHCNLFGLDIPLTLQRPRRQQAVQNNQQP

SEQ ID NO: 3307 - protein, 766 aa, Contarinia nasturtii
MDDDELDDNQPEESKYVVIKCGLQTILRQQHERIESVGEVVTKMLFERSVQMTEVAALASLSILFILNEALDNDDRAFFLKPHPSLFIADCFRAVLNQHVNNINSQYRILPEFRFMVERNSEEQFRWPDDEKLGNGLRYFYKQYITNIQTNTNTWCEKRLENFFRMRCWYRNRFHNGSRFDNIDIRNAKEFSYRFKNLTNGNNGNNVDPQRVEKFNILMRDLTEIGWSGTVSMKFFAKYRWFESLWLFGQMQRQIEVYHSHAEQWYTIHEMFRNNPNFQEPTINRPPKISSFALIPLCDYHLKNVRLDIKDLYYKIVNELDLVPSFLNTRTNRMNKRNLKYYTQTDRSGLWNMLFDVGKINKLGKSKPFHHQILTDSVSISIMYKKPQRQQRPQRQQRPQQTTQANRGPEKLIGKKYIIGIDPNEKSWLTVVRRNIQKTPDEPAVEENIIIPNQRFHWETQQKKRDKEAKKLAGWFDIEEKEHLKTYPYRPPSPRNSTWKSYIEYRIKMLRKGMAAYATREYARLDLDHHIRSTRVNDQIAVRVTNNKPSLVQFGAWAMKPDRPFGIKKRKRCPGSRKFRVSIKKLGHSEVEMQDEWGTSQTCANCQERFPRHTKDDRFKVCYDCRAKKIDGLPDSVAGLPDIIVSTVNRRVLRRKRAIIKRQIIDGNREAVNEKIRTGRLMSKVKVTYKNWPLNVDDDDVVPQTVTWHRDIVAAKCIMLKGMNQLETEYSLFNVFALNYIGLCRIFDVPLPVSLLRPPDYNNNVN

SEQ ID NO: 3308 - protein, 459 aa, Contarinia nasturtii
MKHIRIDIHLFYLIARKFGALKLAKGKRGQPINIEKTEYDSNPAIYWDLIFDLPKISKLGNGKEFDFAVATDSVAVSLCFVKPERNRPELDNNTIKEKYNNFEFDYVLGIDPGVRTWNATVRKHVRSGNEEKITIDGPKYHFKAKYGKRKRKSDQWTELLQKQRELDYKRYAFFPSPKGRSHWMCYIAYYVKMMKPAMAVYTTRKFIRLRLDKYIEENRASDKIAASLTKKKSALVFIGAAQIAPNSPIGIKKRLRCPGLRRLLNSFKKLGNCIVRLVDEYNTSQTCAKCFRPFDRRTKSDRYKVCQHCIPSEDESSQWNLPNVIITMKSNRVYQQLRKYAVDFVNRLNAANPDHIPMDSDGLVSKLQVCFKNWQLNTGIWKDDRAPFQLKTVWHRDIVAAKNIMYKGLCTVLGLDIHPQLLRPQNQNAAVQNQAADDEDSSDDEDYVYVLDVSDDDQF

SEQ ID NO: 3309 - protein, 287 aa, Contarinia nasturtii
MCYIAYYVKMMKPAMAVYTTRKFIRLRLDKYIEENRASDKIAASLTKKKSALVFIGAAQIAPNSPIGIKKRLRCPGLRRLLNSFKKLGNCIVRLVDEYNTSQTCAKCFRPFDRRTKSDRYKVCQHCIPSEDESSQWNLPNVIITMKSNRVYQQLRKYAVDFVNRLNAANPDHIPMDSDGLVSKLQVCFKNWQLNTGIWKDDRAPFQLKTVWHRDIVAAKNIMYKGEKISLKLKMFKNVLANNLLFTILFLALCTVLGLDIHPQLLRPQNQNAAVQNQALRLCSRCFR

SEQ ID NO: 3310 - protein, 787 aa, Contarinia nasturtii
MSTTGETTAATAPRKKRYKFQTNAQKEKDADVNDNGLFAIKMRLNTILRPEFNHIVKPWIEQKSIMSTKITVLASLLFLDKVKSAQMNRQWEFFKNRTYPAKKGKEKGQLVEKNRGEEVIEQCFYAVLQKNKEGENMEPHFRQFVEELSPENNFTWPKNDYFGNHFKTLCQNHTRCLKTGQTTHCKKKLKNYLRMRAWQFNAVSTGWKFDKKDIDNAVDLMIRGYNAIRDTHQNADFKRHKRTLLTGMVTAIVREVGGPTNDHNIKDFSKGDYWFKATAMWLVMQTEIDEWHNWAQDNNVKIPNIKNLSVVPLPDYQRKAVFMCNDVFYRMLAESKQLPQVDGRQATESYIRQNKEFYWNQVFDFTTINRKLKKNKEFHYTIVSNGESVSIMYRMSKQYEQQMQNDDILRKQFIGGKFAYELGIDPGMKTWNATVRRNIETKKEVNMKMSSKKYHWLAKQKTRDVKAKRWTKQFTQEEQDDRNNRQLYQRMPSPLGILWIDYVHHRIKMLKKGMAVYTTPKYTLLQFDKYVESNRTVDKLTGNLVNHKAAIIHMGNAEISPNSCIRIKKHVRAPGTRKLLKGFRKRRNCRVRKTDEWGTSQHCAKCGRRFDPATRSHRFKVCENCGAEPDSIFAEYLPSKIVAQRSKRQLRYNKDVVELYLMRFWAEGLMTEQEFDIAAERLLSKVAVYPKNWQVNTVSGKLEYAQVNADAPYATVQQPYAVDDENELEIEDEQLLMAVHKTSWDRDIVAAKCILIKGHCELFGWDIPAGLDRRSPRQPAVQPNQQP

SEQ ID NO: 3311 - protein, 773 aa, Contarinia nasturtii
MRRKRAKNGRSTSLKMTLNQVLREEYRAPFIDQVTYWCLSATMITTLASLLFLFKANKAFDDENVRFFKGESDEYTNDEFNKYVNGVIGECFTSVLQENYHKLPLAFRRTVEQACPDFLCPENWPAREGMGNAFNHLITQYITNVKNNIRVWAFSRIKKFFTLRRYELNLNRQGNLITELDVKRATKIVMFQSRVERNANIDLLLNEAAGIGLPINVHFQNLIRDRWFQSIPIFINIQRQIFDFHAKYEMLKQRWFQYRRDPNNNVMPTTPLPPKIKNFLVVPIHDFDMKHIRIDIHLFYLIARKFGALKLAKGKRGQPINIEKTEYDSNPAIYWDLIFDLPKISKLGNGKEFDFAVATDSVAVSLCFVKPERNTPELDNNTIKEKYNNFEFDYVLGIDPGVRTWNATVRKHVRSGNEENITIDGPKYHFKAKYGKRKRKSDQWTELLQKQRELDYKRYAFFPSPKGRSHWMCYIAYYVKMMKPAMAVYTTRKFIRLRLDKYIEENRASDKIAASLTKKKSALVFIGAAQIAPNSPIGIKKRLRCPGLRRLLNSFKKLGNCIVRLVDEYNTSQTCAKCFRPFDRRTKSDRYKVCQHCIPSEDESSQWNLPNVIITMKSNRVYQQLRKYAVDFVNRLNAANPDHIPMDSDGLVSKLQVCFKNWQLNTGIWKDDRAPFQLKTVWHRDIVAAKNIMYKGEKISLKLKMFKNVLANNLLFTILFLGLCTVLGLDIHPQLLRPQNQNAAVQNQAADDEDSSDDEDYVYVLDVSDDDQF

SEQ ID NO: 3312 - protein, 549 aa, Contarinia nasturtii
MLYDMVNDLNVFPEIDLHDLTTDEKHWFKAMPMFLSMQREIEEYNLEWPHQHRSKRKKRKRKQSKRRPKRKQMLDDLKFRPFIRNLVVVPMCDFRRKHFKIDCSSMHQVLSSQKLLPKVEVENKNGTTSMVILPQKGFNDARDHWWNQYFYMRKIRRFVRGKKKFDFSINTDGIAVSLQYSAKKKTNNTEYDRSRIVEMILDGKFENFAGVDTGLKSWNTTVTHNIITGTETNFVMSSKQFHWQTGQNVRNAKAKRWTKAFIEEERRDRENRELYPVMPSPKGSYWLNYIKHRVKMMKHGICAYSTAKYTRLAFDKHIKSSSVVDNWVDKVTDKQPTLFLFGADGEVPPDSRISIKKYVRCPGVRKTLRSIKKPRNCVIDLVDEWGSSQTDARCMKRFQNQPKSARFKKCRCIPDARTLLPIKIVSKLGKKDLSEFRLLQRAMNEALEENEPLLSKVKSYYKNWQLNLECSVTWHRDVVAAKNILLKGLWTLLGLPIPDAINRYKARDAVAEAAEVAADVAEAAAAAAANVDNDVEMFEYDQQPADHAV

SEQ ID NO: 3313 - protein, 592 aa, Contarinia nasturtii
MRAFELNDYAIKYNYFNNLYGMIEFELPYYDEEDIKNAINYTYRRRNTAIGDVEREMRLGELLDELRWLGAPDDCNIRDFVKEDWFKSIRMWSEIQRDIRNFHFAYEDRRDKPQIKNFVVVPMCTFQRRHIRIDTDALYVILSNAKLVPRKCGKRTRKDGTTNFKNITSNEFRTNKILSWNLFFDVEKILKLVHNKKEFDSQICSDGVSVSLMYKKPKVPPVETTDDEIKAMYDSNELKYAVGCDPGMRTWNASVRRDLHTKEEVNLRISSKRYHWDAKQGRRNAKAERITRLFTFEEQADRNRIAAMIGEMPSPKGPSWRSYIEHRLRVMNDGIETYSTKQYARLGLDKHIESVRAIDKTACKMVHNQPSIFYMGASGSTPANSPIKIKKHVRCPGTRKLLAAIMKRGNCIIRMVDEYMTSQHCPLCFKRFPVATRSHRYKVCVGCVPNPIVGLPRTIVTNVSKRLLQMRRTIERMWREMRDIGDVIAATLRDGPNAGRLVSKKQRFFKTWLPNVANVEIEGAAGAQPTLTTVWHRDIAAAKLILYKGECVVFKRTIHPNVRRPRRVDNNQPLPLYRGQNQNVNNGHLQPQ

SEQ ID NO: 3314 - protein, 757 aa, Contarinia nasturtii
MDDDELDDNQPEESKYVVIKCGLQTILRQQHERIERVGEVVTKMLFERSVQMTEVAALASLSILFILNEALDNDDRAFFLKPHPSLFIADCFRAVLNQHVNNINSRYRILPEFRFMVERNSEEQFRWPDDEKLGNGLRYFYKQYITNIQTNTNTWCEKRLENFFRMRCWYRNRFNNGSRFDNIDIRNAKEFSYRFKNLTNGNNVDPQRVEKFNILMRDLTEIGWSGTVSMKFFAKYRWFESLWLFGQMQRQIEVYHSHAEQWNTIHEMFRNNPNFQEPTINRPPKISSFALIPLCDYHLKNVRLDIKDLYYKIVNELDLVPSFLNTQTNRMNKRNLKYYTQTDRSGLWNMLFDVGKINKLGKSKPFHHQILTDSVSISIMYKKPQRQQRPQQTTQANRGPEKLIGKKYIIGIDPNEKSWLTVVRRNIQKTPDEPAVEENIIIPNQRFHWETQQKKRDKEAKKLAGWFDIEEKEHLKTYPYRPPSPRNSTWKSYIEYRIKMLRKGMAAYATREYARLDLDHHIRSTRVNDQIAVRVTNNKPSLVQFGAWAMKPDRPFGIKKRKRCPGSRKFRVSIKKLGHSEVEMQDEWGTSQTCANCQERFPRHTKDDRFKVCYDCRAKKIDGLPDSVAGLPDIIVSTVNRRVLRRKRAIIKRQIIDGNREAVNEKIRTGRLMSKVKVTYKNWPLNVDDDDVVPQTVTWHRDIVAAKCIMLKGMNQLETEYSLFNVFALNYIGLCRIFDVPLPVSLLRPPDYNNNVN

SEQ ID NO: 3315 - protein, 368 aa, Contarinia nasturtii
MIRRSKNVNTNNNNNNDDAVPNPGQPDPVPPIIQRAYDSGQIERIIGCDPGYREFVGVVRKDLATDNEENFLKSSKEWHHMTGFFERQYKLKRFTGAFEKKCRKLRENREIYEEMPSKKSADYRTYLDYQLDVFNESCEIKYQKRVVRLKFDAYTRTQVALHVLVKQMTKVDRRMSDAEKTVILAFGGAKFASNSPIKGYLRCPHRALQQMAREYVFVLPINEHNTSQKCSRSGRKLKKRRSVPERQSKDRFLVCPNCKPVEDGVFHDPIQWTGRVHRTFKKKHQEWKYRSICTFHRPVPEAEANPNPQPRQKKKRYQKQLEPKTTVIFNRDINAARNMIKKGLYMLNHLPMPNCFRPFRHQLHYYYN

SEQ ID NO: 3316 - protein, 253 aa, Contarinia nasturtii
MMPSPKGSQWLSYIKHRVKMTKHGIEAYSTAKYTRLALDKYIRSNKAIDGFVNKITNKEPTLLFHGADGEVPPDCPIRIKKHVRCPGVRKLMQAYKKRPYIVVVPVDEWGTSQTDARCMCRFQNQPKSAKFKMCRCIPNAITLLPTKIVSKFGKTDTSTYRQLQRTLNGAFEIEEELMSRVKPYYKKWQLDLECTVTWHRDVVAAKNILLKGLWTLLGLPIPAAINRYWNQINADAAVFDDDNDVDISEPEFE

SEQ ID NO: 3317 - protein, 511 aa, Contarinia nasturtii
MNILLYELERIGWQCQKVHNEQLVPVTVNEFVKDNWFQSLWMFGQMQRQIEVFHQYAQQWHAFRRDGLITNNRPPKVNNFALVPLCRFQLKNVRLDMTDMYYLANTVLGVVPSSRNPLTNRMNKYTLDYYLYGHRDELWNLVFDMDKIKQIGKQKRFHSQIITNSVCVSILYEKPAKAWVENSEQATFNNMTYASAIDPNEKTWVAVVRRHINSNIEENIKISNPRFHWQTEQKKRDRKADRLTWWFVEEEQMDFKSYPVIPSPRGSTWKAYILHRIKMLRMGMQAYATRKYARLDLDHHIKATKTSDKVAMRVTNNKPSWIWIGAGEMAPNRPWGIKKRKRCPGTRKLATSFKKQEHTKVSFQDEWGTSITCANCHERFPRETKNHRFKICRNCIPKPIVGLPPIIVTNLSRQELKKERIVERAINPDRENIERLVPKIKVIFKTWSLTREYHELGDAAPEDMIEHVVIWHRDIVAAKNILFKGMCRLFGIPLPDSLKRPDNPHHANNVN

SEQ ID NO: 3318 - protein, 789 aa, Contarinia nasturtii
MSTTGETTAATAPRKKRYKFQTNAQKEKDADDDVNDNGLFAIKMRLNTILRPEFNHIVKPWIEQKSIMSTKITVLASLLFLDKVKSAQMNRQWEFFKNRTYPAKKGKKKGQLVEKNRGEEVIEQCFYAVLQKNKEGENMEPHFRQFVEELSPENNFTWPKNDYFGNHFKTLCQNHTRCLKTGQTTHCKKKLKNYLRMRAWQFNAVSTGWKFDKKDIDNAVDLMIRGYNAIRDTHQNADFKRHKRTLLTGMVTAIVREVGGPTNDHNIKDFSKGDYWFKATAMWLVMQTEIDEWHNWAQDNNVKIPNIKNLSVVPLPDYQRKAVFMCNDVFYRMLAESKQLPQVDGRQATESYIRQNKEFYWNQVFDLTTINRKLKKNKEFHYTIVSNGESVSIMYRMSKQYEQQMQNDDILRKQFIGGKFAYELGIDPGMKTWNATVRRNIETKKEVNMKTSSKKYHWLAKQKTRDVKAKRWTKQFTQEEQDDRNNRQLYQRMPSPLGILWIDYVHHRIKMLKKGMAVYTTPKYTLLQFDKYVESNRTVDKLTGNLVNHKAAIIHMGNAEISPNSCIRIKKHVRAPGTRKLLKGFRKRRNCRVRKTDEWGTSQHCAKCGRRFNPATRSHRFKVCENCGAEPDSIFAEYLPSKIVAQRSKRQLRYNKDDVELYLMRFWAEGLMTEQEFDIAAERLLSKVAVYPKNWQVNTVSGKLEYAQVDADAPYATVQQPYAVDDENELEIEDKQLLMAVHKTSWDRDIVAAKCILIKGHCELFGWDIPAGLDRRSPRQPAVQPNQQP

SEQ ID NO: 3319 - protein, 228 aa, Contarinia nasturtii
MECDCPKNHQYSQRSKYIFFFKVDEYFTSQTCAKCGGRFDPNTKSNRFKVCENCAPVPNSIMANFLPSKIVAQLSKRRLKYNKVYIEESLAVSLARGEMTEHDFDIIADRLLSKVAVYPKKWQVNAVSGVLEYADVKVDQQPHAVDDENAAEIDGEVAQQPCAVDDECVTEIDDKQQPMIVHQTTWDRDIVAAKCILIKGHCNLFGLDIPLTLQRPRRQQAVQNNQQP

SEQ ID NO: 3320 - protein, 720 aa, Contarinia nasturtii
MLFERSVQMTEVAALASLSILFILNEALDNDDRAFFLKPHPSLFIADCFRAVLNQHVNNINSQYRILPEFRFMVERNSEEQFRWPDDEKLGNGLRYFYKQYITNIQTNTNTWCEKRLENFFRMRCWYRNRFHNGSRFDNIDIRNAKEFSYRFKNLTNGNNVDPQRVEKFNILMRDLTEIGWSGTVSMKFFAKYRWFESLWLFGQMQRQIEVYHSHAEQWYTIHEMFRNNPNFQEPTINRPPKISSFALIPLCDYHLKNVRLDITDLYNKIVNELDLVPSFLNTQTNRMNKRNLKYYTQTDRSGLWNMLFDVGKINKLGKSKPFHHQILTDSVSISIMYKKPQRQQRPQRQQRPQQTTQANRGPEKLIGKKYIIGIDPNEKSWLTVVRRNIQKTPDEPAVEENIIIPNQRFHWETQQKKRDKEAKKLAGWFDIEEKEHLKTYPYRPPSPRNSTWKSYIEYRIKMLRKGMAAYATREYARLDLDHHIRSTRVNDQIAVRVTNNKPSLVQFGAWAMKPDRPFGIKKRKRCPGSRKFRVSIKKLGHSEVEMQDEWGTSQTCANCQERFPRHTKDDRFKVCYDCRAKKIDGLPDSVAGLPDIIVSTVNRRVLRRKRAIIKRQIIDGNREAVNEKIRTGRLMSKVKVTYKNWPLNVDDDDVVPQTVTWHRDIVAAKCIMLKGMNQLETEYSLFNVFALNYIGLCRIFDVPLPVSLLRPPDYNNNVN

SEQ ID NO: 3321 - protein, 746 aa, Contarinia nasturtii
MDDDELDDNQPEESKYVVIKCGLQTILRQQHERIERVGEVVTKMLFERSVQMTEVAALASLSILFILNEALDNDDRAFFLKPHPSLFIADCFRAVLNQHVNNIRSQYRILPEFRFMVERNSEEQFRWPDDEKLGNGLRYFYKQYITNIQTNTNTWCEKRLENFFRMRCWYRNRFHNGSRFDNIDIRNAKEFSYRFKNLTNGNNGNNVDPQRVEKFNILMRDLTEIGWSGTVSMKFFAKYRWFESLWLFGQMQRQIEVYHSHAEQWHTIHEMFRNNPNFQEPTINRPPKISSFALIPLCDYHLKNVRLDIKDLYYKIVNELDLVPSFLNTRTNRMNKRNLKYYTQTDRSGLWNMLFDVGEINKLGKSKSFHHQILTDSVSISIMYKKPQRQQRPQRQQRPQQTTQANRGPEKLIGKKYIIGIDPNEKSWLTVVRRNIQKTPDEPAVEENIIIPNQRFHWETKQKKRDKEAKKLAGWFDIEEKEHLKTYPYRPPSPRNSTWKSYIEYRIKMLRKGMAAYATREYARLDLDHHIRSTRVNDQIAVRVTNNKPSLVQFGAWAMKPDRPFGIKKRKRCPGSRKFRVSIKKLGHSEVEMQDEWGTSQTCANCQERFPRHTKDDRFKVCYDCRAKKIDGLPDSVAGLPDIIVSTVNRRVLRRKRAIIKRQIIDGNREAVNEKLRTGRLMSKVKVTYKNWPLNVDDDDVVPQTVTWHRDIVAAKCIMLKGLCRIFDVPLPVSLLRPPDQNNNVN

SEQ ID NO: 3322 - protein, 213 aa, Contarinia nasturtii
MKTNQVNDNIAVTVTNNGPSIIIFGASEMPPNRPFGLKRRKRCPGSRKFLVSVKKLGHSVVKMEDEWGTSQTCANCQERFPANTKPHRFKVCYGCKAKPIAGLPDSVASLPDIIVTTVSKRALQKGRKEIKRRIRNGNYQDVNEIIRNGRFMSKVKVTFKNWPLNVQGDVAAPQTVVWHRDIVAAKCVMLKGLCRMFGILVPDSLRRPPNNVN

SEQ ID NO: 3323 - protein, 318 aa, Contarinia nasturtii
MYLSMQREIEEFNLLRAHQEPPKKRKKRKHRRPKGKKRKWIIKRKQMLDDLEYLPCIRNLVVLPMCDFRRTHFKIDSSSMYQILSSQKLIPKQLTEDGKPSGKNISQTAFNENKDYIWNQYFYMRKIRWFVRRKNKFDFSINSDGIAVSLQYSTKKKETSNTQSGTSRLDIIDMLKAGKFKRLGGTDSGMRNWNTTTIHEIDTCKEINFVKKSKQFHWETHQNVRNAKAKRFTKNFIEKERQDRENRELYAMMPSPKGSQWLSYIKHRVKMTKHGIEAYSTAKYTRLALDKYIRSNKAIDGFVNKITNKEPTLLFHGR

SEQ ID NO: 3324 - protein, 278 aa, Contarinia nasturtii
MDFKSYPVIPSPRGSTWKAYILHRIKMLRMGMQAYATRKYARLDLDHHIKATKTSDKVAMRVTNNKPSWIWIGAGEMAPNRPWGIKKRKRCPGTRKLATSFKKQEHTKVSFQDEWGTSITCANCHERFPRETKNHRFKICRNCIPKPNIPPIIVTNLSRQELKKERIVERAINPDRENIERLVPKIKVIFKTWSLTREYHELGDAAPEDMIEHVVIWHRDIVAAKNILFKGMCRLFGIPLPDSLAMHLFWENCKLNSQPGLSNLHVFELGHVLIYVKT

SEQ ID NO: 3325 - protein, 263 aa, Contarinia nasturtii
MCYIAYYVKMMKPAMAVYTTRKFIRLRLDKYIEENRASDKIAASLTKKKSALVFIGAAQIAPNSPIGIKKRLRCPGLRRLLNSFKKLGNCIVRLVDEYNTSQTCAKCFRPFDRRTKSDRYKVCQHCIPSEDESSQWNLPNVIITMKSNRVYQQLRKYAVDFVNRLNAANPDHIPIDSDGLVSKLQVCFKNWQLNTGIWKDDRAPFQFKTYKGLCTVLGLDIHPQLLRPQNQNAAVQNQAADDEDSSDDEDYVYVLDVSDDDQF

SEQ ID NO: 3326 - protein, 733 aa, Contarinia nasturtii
MDDDELDDNQPEESKYVVIKCGLQTILRQQHERIERVGEAVTKMLFERSVQMTEVAALASLFILFILNEALDNDDRAFFLQPHPSLFIADCFRAVLNQHVNNINSQYRILPEFRFMVERNSEEQFRWPGDEKLGNGLRYFYKQYITNIQTNTNTWCEKRLENFFRMRCWYRNRFNNGSRFDSIDIRNAKEFSYRFKNLNGNNGNNVDPQRVEKFNILMRDLTEIGWSGTVSMKFFAKYRWFESLWLFGQMQRQIEVYHSHAEQWNTIHEMFRNNPNFQEPTINRPPKISSFALIPLCDYHLKNVRLDITDLYNKIVNKLDLVPSFLNTRTNRMNKRKVEYYTQTDRSGLWNMLFDVGKINKLGKSKPFHHQILTDSVSISIMYKKPQRQQRPQQTTQANRGPEKLIGKKYIIGIDPNEKSWLTVVRRNIQKTPDEPAVEENIIIPNQRFHWETQQKKRDKEAKKLAGWFDIEEKKHLKTYPYRPPSPRNSTWKSYIEYRIKMLRKGMAAYATREYARLDLDHNIRSTRVNDQIAVRVTNNKPSLVQFGAWAMKPDRPFGIKKLKRCPGSRKFRVSIKKLGHSEVEMQDEWGTSQTCANCQERFPRHTKDDRFKVCYDCRAKKIDGLPDSVAGLPDIIVSTVNRRVLRRKRAIIKRQIIDGNREAVNEKIRTGRLMSKVKVTYKNWPLNDDDDDVVPQTVTWHRDIVAAKCIMLKGLCRIFDVPLPVSLLRPPD

SEQ ID NO: 3327 - protein, 334 aa, Contarinia nasturtii
MYKKPQRQQRPQRQQRPQQTTQANRGASQHSKNPDEPAVEENIIIPNQRFHWETQQKKRDKEAKKLAGWFDIEEKEHLKTYPYRPLSPRNSTWKSYIEYRIKMLRKGMAAYATREYARLDLDHYIRSTRVNDQIAVCVTNNKPSLVQFGAWAMKPDRPFGIKKRKRCPGSRKFRVSIKKLGHSEVEMQDEWGTSQTCANCQERFPRHTKDDRFKVCYDCRAKKIDGLPDSVAGLPDIIVSTVNRRVLRRKRAIIKRQIIDGNREAVNEKLRTGRLMSKVKVTYKNWPLNVDDDDVVPQTVTWHRDIVAAKCIMLKGLCRIFDVPLPVSLLRPPD

SEQ ID NO: 3328 - protein, 297 aa, Contarinia nasturtii
MPSPLGILWIDYVHHRIKMLKKGMAVYTTPKYTLLQFDKYVESNRTVDKLTGNLVNHKAAIIHMGNAEISPNSCIRIKKHVRAPGTRKLLKGFRKRRSCRVRKTDEWGTSQHCAKCGRRFNPATRSHRFKVCENCGAEPDSIFAEYLPSKIVAQRSKRQLRYNKDEVELYLMRFWAEGLMTEQEFDIAAERLLSKVAVYPKNWQVNTVSGKLEYAQVNADAPYATVQQPYAVDDENELEIEDKQLLMAVHKTSWDRDIVAAKCILIKGHCELFGWDIPAGLDRRSPRQPAVQPNQQP

SEQ ID NO: 3329 - protein, 259 aa, Contarinia nasturtii
MDFKSYPVIPSPRGSTWKAYILHRIKMLRMGLQAYATRKYARLDLDHHIKATKTSDKVAMRVTNNKPSWIWIGAGEMAPNRPWGIKKRKRCPGTRKLATSFKKQEHTKVSFQDEWGTSITCANCHERFPRETKNHRFKICRNCIPKPIVGLPPIIVTNLSRQELKKERIVERAINPDRENIERLVPKIKVIFKTWSLTREYHELGDAAPEDMIEHVVIWHRDIVAAKNILFKGMCRLFGIPLPDSLKRPDNPHHANNVN

SEQ ID NO: 3330 - protein, 702 aa, Contarinia nasturtii
MSTTGETTAATAPRKKRYKFQTNAQKEKDADDDVNDNGLFAIKMRLNTILRPEFNHIVKPWIEQKSIMSTKITVLASLLFLDKVKSAQMNRQWEFFKNRTYPAKKGKKKGQLVEKNRGEEVIQQCFYAVLQKNKEGENMEPHFRQFVEELSPENNFAWPKNDYFGNHFKTLCQNHTRCLKTGQTTHCKKKLKNYLRMRAWQFNSVSTGWKFDKKDIDNAVDLMIRGYNAIRDTHQNADFKRHKRTLLTGMVTAIVREVGGPTNDHNIKDFSKGDYWFKATAMWLVMQTEIDEWHNWAQDNNVKIPNIKNLSVVPLPDYQRKAVFMCNDVFYRMLAESKQLPQVDGRQATESYIRQNKEFYWNQVFDFTTINRKLKKNKEFHYTIVSNGESVSIMYRMSKQHKQQMQNDDILRKQFIGGKFAYELGIDPGMKTWNATVRRNIKTKKEVNMKTSSKKYHWLAKQKTRDVKAKRWTKQFTQEEQDDRNNRQLYQRMPSPLGILWIDYVHHRIKMLKKGMAVYTTPKYTLLQFDKYVESNRTVDNLTGNLVNHKAAIIHMGNAEISPNSCIRIKKHVRAPGTRKLLKGFRKRRNCRVRKTDEWGTSQHCAKCGRRFNPATRSHRFKVCENCGAEPDSIFAEYLPSKIVAQRSKRQLRYNKDVVELYLMRFWAEGLMTEQEFDIAAERLLSKVAVYPKKLASKHSEW

SEQ ID NO: 3331 - protein, 433 aa, Contarinia nasturtii
MNKRNLKYYTQTDRSGLWNMLFDVGEINKLGKSKSFHHQILTDSVSISIMYKKPQRQQRPQRQQRPQQTTQANRGPEKLIGKKYIIGIDPNEKSWLTVVRRNIQKTPDEPAVEENIIIPNQRFHWETQQKKRDKEAKKLAGWFDIEEKEHLKTYPYRPPSPRNSTWKSYIEYRIKMLRKGMAAYATREYARLDLDHHIRSTRVNDQIAVRVTNNKPSLVQFGAWAMKPDRPFGIKKRKRCPGSRKFRVSIKKLGHSEVEMQDEWGTSQTCANCQERFPRHTKDDRFKVCYDCRAKKIDGLPDSVAGLPDIIVSTVNRRVLRRKRAIIKRQIIDGNREAVNEKIRTGRLMSKVKVTYKNWPLNVDDDDVVPQTVTWHRDIVAAKCIMLKGMNQLETEYSLFNVFALNYIGLCRIFDVPLPVSLLRPPDQNNNGN

SEQ ID NO: 3332 - protein, 522 aa, Contarinia nasturtii
MRCWYRNRFHNGSRFDNIDIRNAKEFSYRFKNLTNGNNVDPQRVEKFNILMRDLTEIGWSGTVSMKFFAKYRWFESLWLFGQMQRQIEVYHSHAEQWYTIHEMFRNNPNFQEPTINRPPKISSFALIPLCDYHLKNVRLDIKDLYYKIILTDSVSISIMYKKPQRQQRPQQQQRPQQTTQANRGPEKLIGKKYIIGIDPNEKSWLTVVRRNIQKTPDEPAVEENIIIPNQRFHWETQQKKRDKEAKKLAGWFDIEEKEHLKTYPYRPPSPRNSTWKSYIEYRIKMLRKGMAAYATREYARLDLDHYIRSTRVNDQIAVCVTNNKPSLVQFGAWAMKPDRPFGIKKRKRCPGSRKFRVSIKKLGHSEVEMQDEWGTSQTCANCQERFPRHTKDDRFKVCYDCRAKKIDGLPDSVAGLPDIIVSTVNRRVLRRKRAIIKRQIIDGNREAVNEKLRTGRLMSKVKVTYKNWPLNVDDDDVVPQTVTWHRDIVAAKCIMLKGLCRIFDVPLPVSLLRPPDQNNNVN

SEQ ID NO: 3333 - protein, 522 aa, Contarinia nasturtii
MRCWYRNRFHNGSRFDNIDIRNAKEFSYRFKNLTNGNNVDPQRVEKFNILMRDLTEIGWSGTVSMKFFAKYRWFESLWLFGQMQRQIEVYHSHAEQWYTIHEMFRNNPNFQEPTINRPPKISSFALIPLCDYHLKNVRLDITDLYNKIILTDSVSISIMYKKPQRQQRPQRQQRPQQTTQANRGPEKLIGKKYIIGIDPNEKSWLTVVRRNIQKTPDEPAVEENIIIPNQRFHWETQQKKRDKEAKKLAGWFDIEEKEHLKTYPYRPPSPRNSTWKSYIEYRIKMLRKGMAAYATREYARLDLDHHIRSTRVNDQIAVCVTNNKPSLVQFGAWAMKPDRPFGIKKRKRCPGSRKFRVSIKKLGHSEVEMQDEWGTSQTCANCQERFPRHTKDDRFKVCYDCRAKKIDGLPDSVAGLPDIIVSTVNRRVLRRKRAIIKRQIIDGNREAVNEKLRTGRLMSKVKVTYKNWPLNVDDDDVVPQTVTWHRDIVAAKCIMLKGLCRIFDVPLPVSLLRPPDQNNNVN

SEQ ID NO: 3334 - protein, 530 aa, Contarinia nasturtii
MRRKRAKNGRSASLKMTLNQVLREEYRAPFIDQVTYWCLSATMITTLASLLFLFKANKAFDDENVRFFKGESDEYTNDEFNKYVNGVIGECFTSVLQENYHKLPLAFRRTVEQACPDFLRPENWPAREGMGNAFNHLITQYITNVKNNIRVWAFSRIKKFFTLKRYELNLNRQGNLITELDVKRATKIVMFQSRVERNANIDLLLNEAVGIGLPINVHFQNLIRDRWFQTIPIFINIQRQIFDFHAKYEMLKQRWFHYRRDPNNNVMPTTPLPPKIKNFLVIPVHDFDMKHIRIDIHLFYSIASKFGALKLAKGKRGQPINIEKTEYDSNPAIYWDLIFDLPKISKLGNGKEFDFAVATDSVAVSLCFVKPERNTPELDNNTIKEKYNNFEFDYVLGIDPGVRTWNATVRKHVRSGNEENITIDGPKYHFKAKYGKRKRKFDQWTELLQKQRELDYKRYAFFPSPKGRSHWMCYIAYYVKMMKPAMAVYTTRKFIRLRLDKYIEENRASDKIAASLTKKSRRSFLLVQLK

SEQ ID NO: 3335 - protein, 718 aa, Contarinia nasturtii
MNVGINNGDFSFFANSGEEKINTCFSQVLAKHNPTNPKPKKTPKPKPKPEPKPKPEPEQPSKTKRKPRGPAKEIPPIDPEFKAIVEGLDEAHRFDWPSNKDFGNGLKHLCNQYIDNNVTNSQTHPDKHITQYLKMKVFQMNTNEAIEEKYLPSDIDCVVKLILKEKVIKVPASDPNKLYRCGVLYDIVNKLNVFPEIDLHDLTTNSKNWFKAVPMYLSMQREIEEFNLLRAHQEPPRKRKKRKRRRPKDKKRKWFIKRKQMLDDLKYLPCIRNLVVVPMCDFRRTHFKIDCSSMYQILSSQKLIPKQLTEDGKPSEKNISQKVFNENKDYIWNQYFYMRKIRWFVRRKKKFDFSINSDGIAVSLQYSTKKTETSNTQSGTSRLDIIDMLKAGKFKRLGGTDSGMRNWNTTTIHEIDTCKEINFVKKSKQFHWETHQNVRNAKAKRFTKNFIEKERQDRENRELYAMMPSPKGSQWLSYIKHRVKMTKHGIEAYSTAKYTRLALDKYIGSNKVIDGFVNKITNKEPTLLFHGADGEVPPDCPIKIKKHVRCPGVRKLMQAYKKRPYIVVVPVDEWGTSQTDARCMCRFQNQPKSAKFKMCRCIPNAITLLPTKIVSKFGKTDTSTYRQLQRTLNGAFEIEEELMSRVKPYYKKWQLDLECTVTWHRDVVAAKNILLKGLWTLLGLPIPAAINRYWNQINADAAVFDDDNDVDISEPEFE

SEQ ID NO: 3336 - protein, 220 aa, Contarinia nasturtii
MFIFVGDRFIAADSPARGYIRSKVRDLFEKLKRRRKCTVVEVDEFRTTKLCSLCFRELEKPTKRGKVKEKYRYLTCHGCEPLCGENVLGKAQGTIESRKSNRKLTQQRKHRPRTDGPRMASKFRKYEEKTRIGRTITWNRDANAGRNILYKGWCAVMNIELHPAFQRHVEEEEENAGGGDPPPAPQARARQSRRAASNQNQQTTQRTLRSHLDQARSSRP

SEQ ID NO: 3337 - protein, 519 aa, Contarinia nasturtii
MPMFLSMQREIEEYNLEWPYQHRSKRKKRKRKKSKRRPKRKQMLDDPNFRPFIRNLVVVPMCDFRRKHYKIDCSSMHQVLSSQELLPKVEVENKNGTTSMVILPQKDFNAARDHWWNQYFYMRKIRRFVRGKKKFDFSINTDGIAVSLQYSAKKKTNNTEYDRSRIVEMILDGKFENFAGVDTGLKSWNTTVTHNIITGTETNFVMSSKQFHWKTGQNVRNAKAKRWTKKFTEEERRDRENRELYPVMPSPKGSHWLDYIKHRIKMMKHGICAYSTAKYTRLALDKHIKSSSVVDNWVEKVTDKQPTLFLFGADGEVPPDSRISIKKHVRCPGVRLTLRSINKRRDCAIELVDEWGSSQTDARCMKRFQNQPKSARFKKCRCIPDARTLLPIKIVSKLGKKDLSEFRLLQRAMNEALEENEPLLSKVKSYYKNWQLNLECSVTWHRDVVAAKNILLKGLWTLLGLPIPDAINRYKARDAVAEAAEVAADVAEAAAAAAANVDNDVEMFEYDQQPADHAV

SEQ ID NO: 3338 - protein, 758 aa, Contarinia nasturtii
MSGRKRKGVGAICGSRPKRRKVGKLPEESGLLAIKVSAATAVKEEYHDIVLPWIAKKSIECTKICELASLLFLHKVKLANEEAILTNNWKFFDEGDGIHIIEGCFFAVLRKYKEENDMVPEFRDIVEALDGDNRFAWPNNDYFGNLMRYLFQQHARNAITNLTTHDDKRLREYLRLLVWEHNVDNLDPNDVFDEHDVNNAVKWAIERYDSTRGDAIRLDKRNRLLTCVRNIGGPKDDNIAKDTKENWFATLPMWLHMQKKIDDYHNWVQNNLENIPADIELPIIKNLSVLPICTHLRKNIKIDADILYRMMCETKIIPLDEYGRQVDGTHVCENKVHYFNEIFDMNKINGILNANKEFHYHVVTDGVSASILYDVSRNTLEQLVSDELIKKRYEDGVYIYELGIDPGMKTWNATVRRHIDSGKEMNFKTSSKKYHYLTKQGVRNRKAKRWTRGFVAFEQNDRNDRTRYPQMPSPKGENWRDYISHRLRIMKKAIDVYTSERYTRLRFDKYIESNRVCDKIAAMLTNGKPCIIFLGAANISPNSPIKIKKNIRCPGNRKLIKSFKKMLGNVVKMVNEFRTSRLCARCFEPFPLETLGHRFKVCEWCVPDNNDWPEGLKLPEKIVTMKSKRMLLSERQELRDAMVANPNQAVGFVSKVICYRKNWRQNAAYDAVNNVAQLPGIIRDENVIDFTEDYMLLDDDFYVAEEEDYLAVLNTIWHRDIAAAKLIMYKGHCGLFGFELHRNFTVERLVYPRWIRIH

SEQ ID NO: 3339 - protein, 230 aa, Contarinia nasturtii
MGMQAYATRKYARLDLDHHIKATKTSDKVAMRVTNNKPSWIWIGAGEMAPNRPWGIKKRKRCPGTRKLATSFKKQEHTKVSFQDEWGTSITCANCHERFPRETKNHRFKICRNCIPKPIVGQPPIIVTNLSRQELKKERIVERAINPDRENIERLVPKIKVIFKTWSLTREYHELGDAAPEDMIEHVVIWHRDIVAAKNILFKGMCRLFGIPLPDSLKRPDNPHHANNVN

SEQ ID NO: 3340 - protein, 789 aa, Contarinia nasturtii
MSTTGETTAATAPRKKRYKFQTNAQKEKDADDDVNDNGLFAIKMRLNTILRPEFNHIVKPWIEQKSIMSTKITVLASLLFLDKVKSAQMNRQWEFFKNRTYPAKKGKKKGQLVEKNRGEEVIEQCFYAVLQKNKEGENMEPHFRQFVEELSPENNFAWPKNDYFGNHFKTLCQNHTRCLKTGQKTHCKKKLKNYLRMRAWQFNAVSTGWKFDKKDIDNAVDLMIRGYNAIRDTHQNADFKRHKRTLLTGMVTAIVREVGGPTNDHNIKDFSKGDYWFKATAMWLVMQTEIDEWHNWAQDNNVKIPNIKNLSVVPLPDYQRKAVFMCNDVFYRMLAESKLLPQVDGRQATESYLRQNKEFYWNQVFDFTTINRKLKKNKEFHYTIVSNGESVSIMYRMSKQYEQQMQNDDILRKQFIGGKFAYELGIDPGMKTWNATVRRNIETKKEVNLKTSSKKYHWLAKQKTRDVKAKRWTKQFTQEEQDDRNNRQLYQRMPSPLGILWIDYVHHRIKMLKKGMAVYTTPKYTLLQFDKYVESNRTVDKLTGNLVNHKAAIIHMGNAEISPNSCIRIKKHVRAPGTRKLLKGFRKRRNCRVRKTDEWGTSQHCAKCGRRFNPATRSHRFKVCENCGAEPDSIFAEYLPSKIVAQRSKRQLRYNKDEVELYLMRFWAEGLMTEQEFDIAAERLLSKVAVYPKNWQVNTVSGKLEYAQVNADAPYATVQQPYAVDDENELEIEDEQLLMAVHKTSWDRDIVAAKCILIKGHCELFGWDIPAGLDRRSPRQPAVQPNQQP

SEQ ID NO: 3341 - protein, 259 aa, Contarinia nasturtii
MSVYSSRKYLRQRLDKYIEENRASDLIAAWLTLKKACLIFIGAAQMAPNSPIGIKKRLRCPGVRRLVRSFNKLGNCIIRYVDEFNTSQTCGKCFRPFDRRTKKDRYKVCQHCIPSGEVTNIWLLGKTVISKKSNREYQQQRQSVKADVQRRNQDPKMSYGLVSKLTISFKKWRLNDDNEWIDDRHPHQLKTVWHRDIVAAVCILYKGLCIVQGIDVHPQLSREHREQQAQNHGNDVENAVNADDSDSDDDYVLEVSDDE

SEQ ID NO: 3342 - protein, 742 aa, Contarinia nasturtii
MGRHKKADPNADQRCIKQGLPSIIRERYRDVIVAIISYLSVKATKIACLASLLFLMKVNEALDDFNYDFFETDEPSTIIHNCFKAVLVDNISNISLMLPGFRNIVDAAHIDWPTNGGFGNGFKYIWEQYYDNVKTNLTTHCESRLRKFFKMRAFELNDYAIKYNYFNNLYGMIEFELPYYDEEDIKNAINYTYRRRNTAIGDVEREMRLGELLDELRWLGAPDDCNIRDFVKEDWFKSIRMWSEIQRDIRNFHFAYEDRRDKPQIKNFVVVPMCTFQRRHIRIDTDALYVILSNAKLVPRKCGKRTRKDGTTNFKNITSNEFRTNKILSWNLFFDVEKILKLVHNKKEFDSQICSDGVSVSLMYKKPKVPPVETTDDEIKAMYDSNELKYAVGCDPGMRTWNASVRRDLHTKEEVNLRISSKRYHWDAKQGRRNAKAERITRLFTFEEQADRNRIAAMIGEMPSPKGPSWRSYIEHRLRVMNDGIETYSTKQYARLGLDKHIESVRAIDKTACKMVHNQPSIFYMGASGSTPANSPIKIKKHVRCPGTRKLLAAIMKRGNCIIRMVDEYMTSQHCPLCFKRFPVATRSHRYKVCVGCVPNPIVGLPRTIVTNVSKRLLQMRRTIERMWREMRDIGDVIAATLRDGPNAGRLVSKKQRFFKTWLPNVANVEIEGAAGAQPTLTTVWHRDIAAAKLILYKGECVVFKRTIHPNVRRPRRVDNNQPLPLYRGQNQNVNNGHLQPQ

SEQ ID NO: 3343 - protein, 617 aa, Contarinia nasturtii
MPPAFRNIVEAHIGEEDFAWPDKECLGNGFNYFYQDHIRNTQTNLNTHCSEHVESFFQMKRWYYNMNINGHQYNGSKFDGIDIRNAKVYATSNKDLTHGDVERTNKMKILLYELERIGWQCQKVHNEQLVPVTVNEFVKDNWFQSLWMFGQMQRQIEVFHQYAKQWHAFRRDGLITNNRPPKVNNFALVPLCRFQLKNVRLDMTDMYYLANTVLGVVPSSRNPLTNRMNKYTLDYYLYGHRDELWNLVFDMDKIKQIGKQKRFHSQIITNSVCVSILYEKPAKAWVENSEQATFNNMTYASAIDPNEKTWVAVVRRHIKSNIEENIKISNPRFHWQTEQKKRDRKADRLTWWFVEEEQMDFKSYPVIPSPRGSTWKAYILHRIKMLRMGMQAYATRKYARLDLDHHIKATKTSDKVAMRVTNNKPSWIWIGAGEMAPNRPWGIKKRKRCPGTRKLATSFKKQEHTKVSFQDEWGTSITCANCHERFPRETKNHRFKICRNCIPKPIVGLPPIIVTNLSRQELKKERIVERAINPDRENIERLVPKIKVIFKTWSLTREYHELGDAAPEDMIEHVVIWHRDIVAAKNILFKGMCRLFGIPLPDSLKRPDNPHHANNVN

SEQ ID NO: 3344 - protein, 498 aa, Contarinia nasturtii
MLKQRWFQYRRDPNNNVMPTTPLPPKIKNFLVIPVHDFDMKHIRIDIHLFYFIARKFGVLKLAKGKRGQPINIEKTEYDSNPAIYWDLIFDLPKISKLGNGKEFDFAVATDSVAVSLCFVKPERNTPELDNNTIKEKYNNFEFDYVLGIDPGVRTWNATVRKHVRSGNEENITIDGPKYHFKAKYGKRKRKSDQWTELLQKQRELDYKRYAFFPSPKGRSHWMCYIAYYVKMMKPAMAVYTTRKFIRLRLDKYIEENRASDKIAASLTKKKSALVFIGAAQIAPNSPIGIKKRLRCPGLRRLLNSFKKLGNCIVRLVDEYNTSQTCAKCFRPFDRRTKSDRYKVCQHCIPSEDESSQWNLPNVIITMKSNRVYQQLRKYAVDFVNRLNAVNPDHIPMDSDGLVSKLQVCFKNWQLNTGIWKDDQAPFQLKTVWHRDIVAAKNIMYKGLFTVLGLDIHPQLLRPQNQNAAVQNQAADDEDSSDDEDYVYVLDVSDDDQF

SEQ ID NO: 3345 - protein, 375 aa, Contarinia nasturtii
MIRRSRNVNTNNNNKNNDDDGDDDNNAVPNPEQPDPVPPIIQRAYDSGQIERIIGCDPGYREFVGVVRKDLATDNEENFLKSSKEWHHMTGFFDRQYKLKRFTGAFEKKCRKLRENREIYEETPSKKSADYHTYLDYQLDVFNESCEIKYQKRVVRLKFDAYTRTQVALHVLVKQMTKVDRRMSDAEKTVILAFGGAKFASNSPIKGYLRCPHRALQQMAREYVFVLPINEHNTSRKCSRSGRKLKKRRSVPERQSKDRFLVCPNCKPVEDGVFHDPIQWTGRVHRTFKKKHQEWKYRSICTFHRPVPEANPNPQPKQKKKRYKKQLEPKTTVIFNRDINAARNMIKKGLYMLDHLPMPNCFRPFGHQLHYYFNN

SEQ ID NO: 3346 - protein, 821 aa, Contarinia nasturtii
MCIRESSFSILNITSVVSINQFNMSTTGETSAAQAKKKRYKYQTKKQQEEEAEDENFNDNGLLAIKMRLTTIVRPEYHDVVIHWIEKKSVMSTKISVLASLLFLDKVKSAQNNRQWDFFTNRMYVNQKGKLVEKNRAEDVIERCFYAVLQKNKENEDMEPHIRHFVEQGLSRDNQFAWPNNNYFGNIMKSLCQSYTRQLKTNQTTHAKKRLRNYLQMRAWQFNAVSTGLRFDKKDVDNAIDWAIRRYDAIRDTHQNAPLKRYKRKLLLDMVRAIVEEVGGLANYDNIKQFSKGKYWFKATAMWLVMQSEIDEFHNWAQDNNVTIPKIKNLSVVPLPDYQRKAVFMCNDVFYRMLAEEKLLPKVEGKQVTETFIRENKEHFWNQIFDFDKINRILKKNKEFHYTIVSNGESVSVLYKLSKQHLQRLLDDDIVRKRYLDGTFVYELGIDPGMKTWNATVRRTISTRKEVNLKTSSKKYHWLTKYKMRDKKAKRWTKQFTLDEQNDRNNRQLYQRMPSPLGTLWTDYICHRIKMLKKGMDVYTTPKYARLKFDKYVESNSTIDKLCGTLVNHQAALIHLGNADMSPNSPIRIKKHVRCPGTRKLLKGFRKRGNCVVRKVDEYFTSQTCAKCGGRFDPNTKSNRFKVCENCAPVPNSIMANFLPSKIVAQFSKRRLKYNKVYIEESLAVFLARGEMTEHDFDIIADRLLSKVAVYPKKWQVNAVSGVLEYADVKVDQQPHAVDDENAAEIDGEVAQQPCAVDDECVTEIDDKQQPMIVHQTTWDRDIVAAKCILIKGHCNLFGLDIPLTLQRPRRQQAVQNNQQP

SEQ ID NO: 3347 - protein, 763 aa, Contarinia nasturtii
MDDDELDDNQPEESKYVVIKCGLQTILRQQHERIERVGEVVTKMLFERSVQMTEVAALASLSILFILNEALDNDDRAFFLKPHPSLFIADCFRAVLNQHVNNIRSQYRILPEFRFMVERNSEEQFRWPDDEKLGNGLRYFYKQYITNIQTNTNTWCEKRLENFFRMRCWYRNRFHNGSRFDNIDIRNAKEFSYRFKNLTNGNNVDPQRVEKFNILMRDLTEIGWSGTVSMKFFAKYRWFESLWLFGQMQRQIEVYHSHAEQWHTIHEMFRNNPNFQEPTINRPPKISSFALIPLCDYHLKNVRLDIKDLYYKIVNELDLVPSFLNTLTNRMNKRNLKYYTQTDRSGLWNMLFDVGEINKLGKSKSFHHQILTDSVSISIMYKKPQRQQRPQRQQRPQQTTQANRGPEKLIGKKYIIGIDPNEKSWLTVVRRNIQKTPDEPAVEENIIIPNQRFHWETKQKKRDKEAKKLAGWFDIEEKEHLKTYPYRPPSPRNSTWKSYIEYRIKMLRKGMAAYATREYARLDLDHHIRSTRVNDQIAVRVTNNKPSLVQFSAWAMKPDRPFGIKKRKRCPGSRKFRVSIKKLGHSEVEMQDEWGTSQTCANCQERFPRHTKDDRFKVCYDCRAKKIDGLPDSVAGLPDIIVSTVNRRVLRRKRAIIKRQIIDGNREAVNEKLRTGRLMSKVKVTYKNWPLNVDDDDVVPQTVTWHRDIVAAKCIMLKGMNQLETEYSLFNVFALNYIGLCRIFDVPLPVSLLRPPDQNNNGN

SEQ ID NO: 3348 - protein, 747 aa, Contarinia nasturtii
MRRKRAKNGRSTSLKMTLNQVLREGYRAPFIDQVTYWCLSATMITTLASLLFLFKANKAFDDENVRFFKGESDEYTNDEFNKYVNGVIGECFTSVLQENYHKLPLAFRRTVEQACPDFLRPENWPAREGMGNAFNHLITQYITNVKNNIKVWAFSRIKKFFTLKRYELNLNRQGNLITELDVKRATKIVMFQSRVERNANIDLLLNEAAGIGLPINVHFQNLIRDRWFQTIPIFINIQRQIFDFHAKYEMLKQRWFQYRRDPNNNVMPTTPLPPKIKNFLVVPIHDFDMKHIRIDIHLFYLIARKFGALKLAKGKRGQPINIEKTEYDSNPAFYWNLIFDMPKISKLGNGKEFDFAVATDSVAVSLCFVKPERNTPELDNNTIKEKYNNFEFDYVLGIDPGVRTWNATVRKHVRSGNEENITIDGPKYHFKAKYGKRKRKSDQWTELLQKQRELDYKRYAFFPSPKGRSHWMCYIAYYVKMMKPAMAVYTTRKFIRLRLDKYIEENRASDKIAASLTKKKSALVFIGAAQIAPNSPIGIKKRLRCPGLRRLLNSFKKLGNCIVRLVDEYNTSQTCAKCFRPFDRRTKSDRYKVCQHCIPSEDESSQWNLPNVIITMKSNRVYQQLRKYAVDFVNRLNAVNPDHIPMDSDGLVSKLQVCFKNWQLNTGIWKDDQAPFQLKTVWHRDIVAAKNIMYKGLCTVLGLDIHPQLLRPQNQNAAVQNQAADDEDSSDDENYVYVLDVSDDDQF

SEQ ID NO: 3349 - protein, 981 aa, Contarinia nasturtii
MSDTSSGDDDDGDEECGVERGNVVSNLANNQPVVRLERMSRDLLRQWNVPRPNVTQQTPARRSKRVQTVPSVARSSQPQDSSDDEPLAAKIRRTTQPSNSVSNLANNQPVVRLQRMSNDLLRQWNVPRPSVTQQTPARRSKRVQTVPSIARPLVSEPPPSRPVLRPAMRDEPSTSRGLTSAPRPSSSRFTQQTPARRSKRVQTVPSVARSLVQSPAIPSTSAAPAGAPLQPLRNERVCRRKGEQSDPNQETFTIKMSLRSFLRNGPNDPTRIGGKRNKDQMDAANADNANNRESDMKRRLMAIIDNAVIEMSDLTRLSAYYVHNELNRLVDSNNDAAIRAEFLAPFDAHKYFFALKHCQANVNCPLNPVFAQYLRDKNSPVQPHINNLTHPISFAYQQSATNMRNNTNMHGNDHIRNYFKRKNIMEQEIDVLMDYLQYEDSEVELYDGTRAHLTEYYDELHPLLPLDRIALYENDPENVVFQDDHLIPRGWLWTTTDDTKYYKHVHELIHLQRWIQQHNVANPNEQWRSFRAIPQSKNKRKHVQFDTEGFIDMTNLLYARREDKVRRSDKPNWDNNDYDTFWNRYVNLRKINRNGQIFGNYFTTDGVTACLRMIRRKRDATSAPTKTSKKNNKKKKGKKQYEKKEPPKCPEDIKAAFRAGQITKIIGDDPGAKVSRSTTSRDLKSTLEWSYKLTAKQWYAKSGARNRKHRLRRYTGVLEDELQQKRNDLHALYGEQPSSKSANHQLYLEYNLDSFMASRQVHYQRRVARLELDKHIRRQVAAHQVARDMTLLEKEIPKAQQTIVYALGDAKIGANSPIKGHCRTPQAFITHTIDRYCRIMAVHEPGTSMLCSRDHDILDQPLHRERPENMNPKDRFLVCNNCEPALNHVLPPPNEWIGKIHHTFRSKHRLELEPNLKHYGHSIANQQYNGRKQTIVFDRDLNASRNMIYKSLCMIQDIPINGDFNRSAAYLRQRAANAAAH

SEQ ID NO: 3350 - protein, 381 aa, Contarinia nasturtii
MYLSMQREIEEFNLLRAHQEPPKKRKKRKRRRPKGKKRQWIIKRKQMLDDLEYLPCIRNLVVVPMCDFRRTHFKIDCSSMYQILSSQKLIPKQLTEDGKPSDKNISQKVFNENKDYIWNQYFYMRKIRWFVRRKKKFDFSINSDGIAVSLQYSTKKKETSNTQSGTSRLDIIDMLKAGKFKRLGGTDSGMRNWNTITIHEIDTCKEINFVKKSKQFHWETHQNVRNAKAKRFTKNFIEKERQDRENRELYAMMPSPKGSQWLSYIKHRVKMTKHGIEAYSTAKYTRLALDKYIGSNKVIDGFVNKITNKEPTLLFHGADGEVPPDCPSKGILLKLLQINEKIKSLTELEKLFRTVVHAYFIRLQAVFQNNIFHTFVMNPFV

SEQ ID NO: 3351 - protein, 276 aa, Contarinia nasturtii
MCYIAYYVKMMKPAMAVYTTRKFIRLRLDKYIEENRASDKIAASLTKKKSALVFIGAAQIASNSPIGIKKRLRCPVLRRLLNSFKKLRNCIVRLVDEYNTSQTCAKCFRPFDRRTKSDRYKVCQHCIPSEDESSQWNLPNVIITMKSNRVYQQLRKYAVDFVNRLNAANPDHIPMDSDGLVSKLQVCFKNWQLNTGIWKDDRAPFQLKTVWHRDIVAAKNIMYKGLCTVLGLDIHPQLLRPQNQNAAVQNQAADDEDSSDDEDYVYFLDVSDDDQF

SEQ ID NO: 3352 - protein, 638 aa, Contarinia nasturtii
MVPEFRDIVEALDGDNRFAWPNNDYFGNLMRYLFQQHARNAITNLTTHDDKRLREYLRLLVWEHNVDNLDPNDVFDEHDVNNAVKWAIERYDSTRGDAIRLDKRNRLLTCVRNIGGPKDDNIAKDTKENWFATLPMWLHMQKKIDDYHNWVQNNLENIPADIELPIIKNLSVLPICTHLRKNIKIDADILYRMMCETKIIPLDEYGRQVDGTHVCENKVHYFNEIFDMNKINGILNANKEFHYHVVTDGVSASILYDVSRNTLEQLVSDELIKKRYEDGVYIYELGIDPGMKTWNATVRRHIDSGKEMNFKTSSKKYHYLTKQGVRNRKAKRWTRGFVAFEQNDRNDRTRYPQMPSPKGENWRDYISHRLRIMKKAIDVYTSERYTRLRFDKYIESNRVCDKIAAMLTNGKPCIIFLGAANISPNSPIKIKKNIRCPGNRKLIKSFKKMLGNVVKMVNEFRTSRLCARCFEPFPLETLGHRFKVCEWCVPDNNDWPEGLKLPEKIVTMKSKRMLLSERQELRDAMVANPNQAVGFVSKVICYRKNWRQNAAYDAVNNVAQLPGIIRDENVIDFTEDYMLLDDDFYVAEEEAILNTIWHRDIAAAKLIMYKGHCGLFGFELHRNFTVERLVYPRWIRIH

SEQ ID NO: 3353 - protein, 549 aa, Contarinia nasturtii
MLYDMVNDLNVFPEIDLHDLTTDEKHWFKAMPMFLSMQREIEEYNLEWPHQHRSKRKKRKRKKSKRRPKRKQMLDDLKFRPFIRNLVVVPMCDFRRKHFKIDCSSMHQVLSSQKLLPKVEVENKNGTTSMVILPQKGFNDARDHWWNQYFYMRKIRRFVRGKKKFDFSINTDGIAVSLQYSAKKKTNNTEYDRSRIVEMILDGKFENFAGVDTGLKSWNTTVTHNIITGTETNFVMSSKQFHWQTGQNVRNAKAKRWTKAFIEEERRDRENRELYPVMPSPKGSYWLNYIKHRVKMMKHGICAYSTAKYTRLALDKHIKSSSVVDNWVEKVTDKQSTLFLFGADGEVPPDSRISIKKHVRCPGVRLTLRSIKKRRDCAIELVDEWGSSQTDARCMKRFQNQPKSARFKKCRCIPDARTLLPIKIVSKLGKKDLSEFRLLQRAMNEALEENEPLLSKVKSYYKNWQLNLECSVTWHRDVVAAKNILLKGLWTLLGLPIPDAINRYKARDAVAEAAEVAADVAEAAAAAAANVDNDVEMFEYDQQPADHAV

SEQ ID NO: 3354 - protein, 741 aa, Contarinia nasturtii
MSGRKRNHESAFKPRKKIKIKEHQTIKKSARKGLKVNLPINTGKFAQLIDVYVLEMTRCYILGALNLHYFTSDHFKRSTDEQIEAFYSQFVDKNFFRDWFYGVQFIEHAFNDARESGYRLCYGIWYYCQKYGVRAPVIGGFGNVVEYAVQMFYTNYKNNICMHAHSRIRKFFTHQNASKAQIDDTMDFLFKQNSNCVPDLDLMWELENTLKPIRFDDGKGYFFAMESNWFKYIPIFLNLQQYIRNHERERKAALKRGERTELREYGNFTVVPTSSFERHYIRIDRRVFYRMLRQIECPHRLFRNKNGGPKQEKDIKNKEWDVLWRLYFDIDSIEREPRNKNDGHATIKFDNSIQTDGVGMSFLMERTKFIIEKDDEERMKETQEMLLKSQQVYGLDPGLRLVIGGVRINNFNDRNNRTETIIRLTSGQYQDMINSSRRNKWRKKLTTEIDEKMRLHRESFDEQPGPRAEDHKSYADHILRHFEEKFTAYTQYEYALQAFLQYIDTNRALDAYATKLIDGKQTFIFVGDRFIAADSPARGYIRSKVRDLFEKLKRRRKCTVVEVDEFRTTKLCSLCFRELEKPTKRGKVKEKYRYLTCHGCEPLCGENVLGKAQGPIESRKSNRKLTQQRKHRPRTDGPRMASKFRKYEEKTRIGRTITWNRDANAGRNILYKGWCAVMNIELHPAFQRHVEEEEENAGGGDPPPAPPARARQSRRAASNQNQQTTQRTLRSHLDQARSSRP

SEQ ID NO: 3355 - protein, 415 aa, Contarinia nasturtii
MKDMYYLANTVLGVVPSSRNPLTNRMNKYTLDYYMNGHRDELWNLVFDMDKIKQIGKQKRFHSQIITNSVCVSILYEKPAKAWVENSEQATFNNMTYASAIDPNEKTWVAVVRRHINSNIEENIKISNPRFHWQTEQKKRDRKADRLTWWFVEEEQMDFKSYPVIPSPRGSTWKAYILHRIKMLRMGMQAYATRKYARLDFDHHIKATKTSDKVAMRVTNNKPSWIWIGAGEMAPNRPWGIKKRKRCPGTRKLATSFKKQEHTKVSFQDEWGTSITCANCHERFPRETKNHRFKICRNCIPKPIVGLPPIIVTNLSRQELKKERIVERAINPDRENIERLVPKIKVIFKTWSLTREYHELGDAAPEDMIEHVVIWHRDIVAAKNILFKGMCRLFGIPLPDSLKRPDNPHHANNVN

SEQ ID NO: 3356 - protein, 202 aa, Contarinia nasturtii
MKPDRPFGIKKRKRCPGSRKFRVSIKKLGHSEVEMQDEWGTSQTCANCQERFPRHTKDDRFKVCYDCRAKKIDGLPDSVAGLPDIIVSTVNRRVLRRKRAIIKRQIIDGNREAVNEKLRTGRLMSKVKVTYKNWPLNVDDDDVVPQTVTWHRDIVAAKCIMLKGMNQLETEYSLFNVFALNYIGLCRIFDVPLPVSLLRPPD

SEQ ID NO: 3357 - protein, 723 aa, Contarinia nasturtii
MSRTRSREDQFNIPLERKDDIKNLVVIKQGVKSIIREEYRDRVIQFLDHRSYKMTLISSLASLLALYKIQEAIDDENRQFFLQNGKTFFIECFNGVLADKVDREELMPPAFRNIVEAHFGVENFEWPDKECLGNGFNYFYQDHIRNNQTNLNTHCSEHVESFFQMKRWYYNMNINGHQYNGSKFDGIDIRNAKVYATSNKDLTHGDVERTNKMNILLYELERIGWQCQKVHNEQLVPVTVNEFVKDNWFQSLWMFGQMQRQIEVFHQYAQQWHAFRRDGLITNNRPPKVNNFALVPLCRFQLKNVRLDMTDMYYLANTVLGVVPSSRNPLTNRMNKYTLDYYLYGHRDELWNLVFDMDKIKQIGKQKRFHSQIITNSVCVSILYEKPAKAWVENSEQATFNNMTYASAIDPNEKTWVAVVRRHINSNIEENIKISNPRFHWQTEQKKRDRKANRLTWWFVEEEQMDFKSYPVIPSPRGSTWKAYILHRIKMLRMGMQAYATRKYARLDLDHHIKATKTSDKVAMRVTNNKPSWIWIGAGEMAPNRPWGIKKRKRCPGTRKLATSFKKQEHTKVSFQDEWGTSITCANCHERFPRETKNHRFKICRNCIPKPIVGLPPIIVTNLSRQELKKERIVERAINPDRENIERLVPKIKVIFKTWSLTREYHELGDAAPEDMIEHVVIWHRDIVAAKNILFKGMCRLFGIPLPDSLKRPDNPHHANNVN

SEQ ID NO: 3358 - protein, 610 aa, Contarinia nasturtii
MDDDELDDNQPEESKYVVIKCGLQTILRQQHERIERVGEVVTKMLFERSVQMTEVAALASLSILFILNEALDNDDRAFFLKPHPSLFIADCFRAVLNQHVNNINSQYRILPEFRFMVERNSEEQFRWPDDEKLGNGLRYFYKQYITNIQTNTNTWCEKRLENFFRMRCWYRNRFHNGSRFDNIDIRNAKEFSYRFKNLTNGNNGNNVDPQRVEKFNILMRDLTEIGWSGTVSMKFFAKYRWFESLWLFGQMQRQIEVYHSHAEQWYTIHEMFRNNPNFQEPTINRPPKISSFALIPLCDYHLKNVRLDIKDLYNKIVNELDLVPSFLNTRTNRMNKRNLKYYTQTDRSGLWNMLFDVGEINKLGKSKSFHHQILTDSVSISIMYKKPQRQQRPQQTTQANRGPEKLIGKKYIIGIDPNEKSWLTVVRRNIQKTPDEPAVEENIIIPNQRFHWETQQKKRDKEAKKLAGWFDIEEKEHLKTYPYRPPSPRNSTWKSYIEYRIKMLRKGMAAYATREYARLDLDHHIRSTRVNDQIAVRVTNNKPSLVQFGAWAMKPDRPFGIKKRKRCPGSRKFRVSIKKLGHSEVEMQDEWGNITNMRELSGTFSKAHKR

SEQ ID NO: 3359 - protein, 498 aa, Contarinia nasturtii
MLKQHWFQYRRDPNNNVMPTTPLPPKIKNFLVVPIHDFDMKHIRIDIHLFYLIARKFGALKLAKGKRGQPINIEKTEYDSNPAIYWDLIFDLPKISKLGNGKEFDFAVATDSVAVSLCFVKPERNRPELDNNTFKEKYNNFEFDYVLGIDPGVRTWNATVRKHVRSGNEENITIDGPKYHFKAKYGKRKRKSDQWTELLQKQRELDYKRYAFFPSPKGRSHWMCYIAYYVKMMKPAMAVYTTRKFIRLRLDKYIEENRASDKIAASLTKKKSALVFIGAAQIAPNSPIGIKKRLRCPGLRRLLNSFKKLGNCIVRLVDEYNTSQTCAKCFRPFDRRTKSDRYKVCQHCIPSEDESSQWNLPNVIITMKSNRVYQQLRKYAVDFVNRLKAVNPDHIPMDSDGLVSKLQVCFKNWQLNTGIWKDDQAPFQLKTVWHRDIVAAKNIMYKGLCTVLGLDIHPQLLRPQNQKAAVQNQAADDEDSSDDEDYVYVLDVSDDDQF

SEQ ID NO: 3360 - protein, 716 aa, Contarinia nasturtii
MNVGINNGDFSFFANSGEEKINTCFSQVLAKHNPKNPKPKKTPKPKPKPQPKPEPEQPSKTKRKPRGPAKEIPPIDPEFKAIVEGLDEVHRFDWPSNKDFGNGLKHLCNQYIDNNVTNSQTHSDKHITQYLKMKVFQMNTNEAIEEKYLPSDIDCVVKLILKEKVIKVPASDPNKLYRCGVLYDIVNKLNVFPEIDLHDLTTSSKNWFKAVPMYLSMQREIEEFNLLRAHQEPPKKRKKRKRRRPKGKKRQWIIKRKQMLDDLEYLPCIRNLVVVPMCDFRRTHFKIDCSSMYQILSSQKLIPKQLTEDGKPSDKNISQKVFNENKDYIWNQYFYMRKIRWFVRRKKKFDFSINSDGIAVSLQYSTKKKETSNTQSGTSRLDIIDMLKAGKFKRLGGTDSGMRNWNTTTIHEIDTCKEINFVKKSKQFHWETHQNVRNAKAKRFTKNFIEKERQDRENRELYAMMPSPKGSQWLSYIKHRVKMTKHGIEAYSTAKYTRLALDKYIGSNKVIDGFVNKITNKEPTLLFHGADGEVPPDCPIRIKKHVRCPGVRKLMQAYKKRPYIVVVPVDEWGTSQTDARCMCRFQNQPKSAKFKMCRCIPNAITLLPTKIVSKFGKTDTSTYRQLQRTLNGAFEIEEELMSRVKPYYKKWQLDLECTVTWHRDVVAAKNILLKGLWTLLGLPIPAAINRYWNQINADAAVFDDDNDVDISEPEFE

SEQ ID NO: 3361 - protein, 490 aa, Contarinia nasturtii
MQRQIEVYHSHAEQWNTIHEMFRNNPNFQEPTINRPPKISSFALIPLCDYHLKNVRLDIKDLYYKIVNELDLVPSFLNTRTNRMNKRNLKYYTQTDRSGLWNMLFDVGKINKLGKSKPFHHQILTDSVSISIMYKKPQRQQRPQRQQRPQQTIQANRGPEKLIGKKYIIGIDPNEKSWLTVVRRNIQKTPDEPAVEENIIIPNQRFHWETQQKKRDKEAKKLAGWFDIEEKEHLKTYPYRPPSPRNSTWKSYIEYRIKMLRKGMAAYATREYARLDLDHHIRSTRVNDQIAVRVTNNKPSLVQFGAWTMKPDRPFGIKKRKRCPGSRKFCVIIKKLGHSEVEMQDEWGTSQTCANCQERFPRHTKDDRFKVCYDCRAKKIDGLPDSVAGLPDIIVSMVNRRVLRRKRAIIKRQIIDGNREAVNEKLRTGRLMSKVKVTYKNWPLNVDDDDVVPQTVTWHRDIVAAKCIMLKGLCRIFDVPLSVSLLRPPD

SEQ ID NO: 3362 - protein, 234 aa, Contarinia nasturtii
MRDLYEKLASKLKVVPSSLNTDTRRLNKYPEKYYKDHDRYCTPNQSGRATKMCIYRQTILVGKKYVIGINPNEKTWLAITRCNIPKTPDEPAVEENITIPNTRFYWGTRQKRREKEANKLAGWFDIEEKNHLKSYPFSPPSPRNSTWQWYIEYRIKMLRKGMSAYATRKYSRLDLDHYIKSNYVKYKIAVTVTNNMPSMIIFGASEMAPNQTFGVKKRKRCPGSRKFLVSVKKL

SEQ ID NO: 3363 - protein, 785 aa, Contarinia nasturtii
MANRKYKKLKNNKSGKLKSISVSAPKKPEKEEKIVGLATIKCKFKSIIRKEYRDVIYSAITEKSLEATKIAVLASQLFLFKVQSAMDYNNFGFFEQNGEKLIRKCFYAVLGKNIENCTMEPEFRQFAQNLDDDHRFEWPNNKHFGNAMGDIIDIYENNLITNLNTHPGKRLREYLNMKVYMINSNPYSVFKFQEKDVSACIRLAIYGNDVVIRGMDDVAKRERVQWLMDYIRRICWWDIPNDNLGLFTKKQWFKSLQIWLTMQREIDEFNIDQELREERKEQRQEQRKQRRQKRKQDGQQQSKSPEDNAKNNVPKIKNLTVIPICQFKRKYFPIDTFTLYKILCGLKLMPKNDNGIQLTSKEFQRDKEWYWDKIFDMPKIKRLGKRKKMFHYRIMSDGEGVSLLYDIEREPFKPIDKAAIRKRFVENGPDKIKKLLGIDPNEKTWNATVQRDVETGKEVNIKISSKHYHWIAKQKVRNKKAKRYTKSFTQEEQNDRNNRALYPAMPSPMGKHWLCYVHHRLKMLDKGMEAYASDKYTRLCFDKYVESNSAIDQIAGMLVNYEAAVVYFGAAEISPNLPFHIKKHVRCPGARKMKNAFKKRGDCVIVPTDEYYTSQTCPKCLERFDPRTKSHRFKVCQDCKPHPAAMLPSMIVTQMGTRKLQTFRKIDRIANAEAEANHQNAGPLLSKVVVYRKIWLVNPDSGVLEYADTDAAQQQPSAAEQLNALVAAIEVEFIDFEGRIKRKTVWHRDIAAAKCILIKGHFWLFDLEIPKTLQRPAPAAQNNQY

SEQ ID NO: 3364 - protein, 699 aa, Contarinia nasturtii
MYVNQKGKLVEKNRAEDVIERCFYAVLQKNKENEDMEPHIRHFVEQGLSRDNQFAWPNNNYFGNIMKSLCQSYTRQLKTNQTTHAKKRLRNYLQMRAWQFNAVSTGLRFDKKDVDNAIDWAIRRYDAIRDTHQNAPLKRYKRKLLLDMVRAIVEEVGGLANYDNIKQFSKGKYWFKATAMWLVMQSEIDEFHNWAQDNNVTIPKIKNLSVVPLPDYQRKAVFMCNDVFYRMLAEEKLLPKVEGKQVTETFIRENKEHFWNQIFDFDKINRILKKNKEFHYTIVSNGESVSVLYKLSKQHLQRLLDDDIVRKRYLDGTFVYELGIDPGMKTWNATVRRTISTRKEVNLKTSSKKYHWLTKYKMRDKKAKRWTKQFTLDEQNDRNNRQLYQRMPSPLGTLWTDYICHRIKMLKKGMDVYTTPKYARLKFDKYVESNSTIDKLCGTLVNHQAALIHLGNADMSPNSPIRIKKHVRCPGTRKLLKGFRKRGNCVVRKVDEYFTSQTCAKYGGRFDPNTKSNRFKVCENCAPVPNSIMANFLPSKIVAQLSKRRLKYNKVYIEESLAVFLARGEMTEHDFDIIADRLLSKVAVYPKKWQVNAVSGVLEYADVKVDQQPHAVDDENAAEIDGDVAQQPCAVDDECVTEIDDKQQPMIVHQTTWDRDIVAAKCILIKGHCNLFGVDIPLTLQRPRRQQAVQNNQQP

SEQ ID NO: 3365 - protein, 742 aa, Contarinia nasturtii
MGRHKKADPNADQRCIKQGLPSIIRERYRDVIVAIISYLSVKATKIACLASLLFLMKVNEALDDFNYDFFETDEPSTIIHNCFKAVLVDNIGNISLMLPGFRNIVDAAHIDWPTNGGFGNGFKYIWEQYYDNVKTNLTTHCESRLRKFFKMRAFELNDYAIKYNYFNNLYGMIEFELPYYDEEDIKNAINYTYRRRNTAIGDVEREMRLGELLDELRWLGAPDDCNIRDFVKEDWFKSIRMWSEIQRDIRNFHFAYEDRRDKPQIKNFVVVPMCTFQRRHIRIDTDALYVILSNAKLVPRKCGKRTRKDGTTNFKNITSNEFRTNKILSWNLFFDVEKILKLVHNKKEFDSQICSDGVSVSLLYKKPKVPPVETTDDEIKAMYDSNELKYAVGCDPGMRTWNASVRRDLHTKEEVNLRISSKRYHWDAKQGRRNAKAERITRLFTFEEQADRNRIAAMIGEMPSPKGPSWRSYIEHRLRVMNDGIETYSTKQYARLGLDKHIESVRAIDKTACKMVHNQPSIFYMGASGSTPANSPIKIKKHVRCPGTRKLLAAIMKRGNCIIRMVDEYMTSQHCPLCFKRFPQETRRDRYKTCVGCVPNPIVGLPRTIVTNVSKRLLQMRRTIERMWREMRDIGDVIAATLRDGPNAGRLVSKKQRFFKTWLPNVANVEIEGAAGAQPTLTTVWHRDIAAAKLILYKGECVVFKRTIHPNVRRPRRVDNNQPLPLYRGQNQNVNNGHLQPQ

SEQ ID NO: 3366 - protein, 321 aa, Contarinia nasturtii
MTYASAIDPNEKTWVAVVRRHIKSNIEENIKISNPRFHWQTEQKKRDRKADRLTWWFVEEEQMDFKSYPVIPSPRGSTWKAYILHRIKMLRMGMQAYATRKYARLDLDHHIKATKTSDKVAMRVTNNKPSWIWIGAGEMAPNRPWGIKKRKRCPGTRKLATSFKKQEHTKVSFQDEWGTSITCANCHERFPRETKNHRFKICRNCIPKPIVGLPPIIVTNLSRQELKKERIVERAINPDRENIERLVPKIKVIFKTWSLTREYHELGDAAPEDMIEHVVIWHRDIVAAKNILFKGMCRLFGIPLPDSLKRPDNPHHANNVN

SEQ ID NO: 3367 - protein, 321 aa, Contarinia nasturtii
MTYASAIDPNEKTWVAVVRRHINSNIEENIKISNPRFHWQTEQKKRDRKADRLTWWFVEEEQMDFKSYPVIPSPRGSTWKAYILHRIKMLRMGMQAYATRKYARLDLDHHIKATKTSDKVAMRVTNNKPSWIWIGAGEMAPNRPWGIKKRKRCPGTRKLATSFKKQEHTKVSFQDEWGTSITCANCHERFPRETKNHRFKICRNCIPKPIVGLPPIIVTNLSRQELKKERIVERAINPDRENIERLVPKIKVIFKTWSLTREYHELGDAAPEDMIEHVVIWHRDIVAAKNILFKGMCRLFGIPLPNSLKRPDNPHHANNVN

SEQ ID NO: 3368 - protein, 634 aa, Contarinia nasturtii
MRRKRAKNGRSTSLKMTLNQVLREEYRAPFIDQVTYWCLSATMITTLASLLFLFKANKAFDDENVRFFKGESDEYTNDQFNKYVNGVIGECFTSVLQENYHKLPLAFRRTVEQACPDFLRPENWPAREGMGNAFNHLITQYITNVKNNIKVWAFSRIKKFFTLKRYELNLNRQGNLITELDVKRATKIVMFQSRVERNANIDLLLNEAAGIGLPINVHFQNLIRDRWFQTIPIFINIQRQIFDFHAKYEMLKQRWFQYRRDPNNNVMPTTPLPPKIKNFLVVPIHDFDMKHIRIDIHLFYLIARKFGALKLAKGKRGQPINIEKTEYDSNPAFYWNLIFDMPKISKLGNGKEFDFAVATDSVAVSLCFVKPERNTPELDNNTIKEKYNNFEFDYVLGIDPGVRTWNATVRKHVRSGNEENITIDGPKYHFKAKYGKRKRKSDQWTELLQKQRELDYKRYAFFPSPKGRSHWMCYIAYYVKMMKPAMAVYTTRKFIRLRLDKYIEENRASDKIAASLTKKKSALVFIGAAQIAPNSPIGIKKRLRCPGLRRLLNSFKKLGNCIVRLVDEYNTSQTCAKCFRPFDRRTKSDRYKVCQHCIPSEDESSQWNLPNVIITQVSIIHFSKSVHALLTLFV

SEQ ID NO: 3369 - protein, 742 aa, Contarinia nasturtii
MGRHKKADPNADQRCIKQGLPSIIRERYRDVIVAIISYLSVKATKIACLASLLFLMKVNEALDDFNYDFFETDKPSTIIHNCFKAVLVDNIGNISLMLPGFRNIVDAAHIDWPTNGGFGNGFKYMWEQYYDNVKTNLTTHCESRLRKFFKMRAFELNDYAIKYNYFNNLYGMIEFELPYYDEEDIKNAINYTYRRRNTAIGDVEREMRLGELLDELRWLGAPDDCNIRDFVKEDWFKSIRMWSEIQRDIRNFHFAYEDRRDKPQIKNFVVVPMCTFQRRHIRIDTDALYVILSNAKLVPRKCGKRTRKDGTTNFKNITSNEFRTNKILSWNLFFDVEKILKLVHNKKEFDSQICSDGVSVSLMYKKPKVPPVETTDDEIKAMYDSNELKYAVGCDPGMRTWNASVRRDLHTKEEVNLRISSKRYHWDAKQGRRNAKAERITRLFTFEEQADRNRIAAMIGEMPSPKGPSWRSYIEHRLRVMNDGIETYSTKQYARLGLDKHIESVRAIDKTACKMVYNQPSIFYMGASGSTPANSPIKIKKHVRCPGTRKLLAAIMKRGNCIIRMVDEYMTSQHCPLCFKRFPQETRRDRYKTCVGCVPNPIVGLPRTIVTNVSKRLLQMRRTIERMWREMRDIGDVIAATLRDGPNAGRLVSKKQRFFKTWLPNVANVEIEGAAGAQPTLTTVWHRDIAAAKLILYKGECVVFKRTIHPNVRRPRRVDNNQPLPLYRGQNQNVNNGHLQPQ

SEQ ID NO: 3370 - protein, 468 aa, Contarinia nasturtii
MWIHIQREIQWYHNEYKCRRDAPQIKNFVVVPMCRFQRRHIRIDTDALYTILASVKLVPLKCGLKKRKDKTTNSINITSNEFRRNKILSWNLFFNVEKIQQLVHFKKYFDFQICSDGVSVSMMYKKPKLPPVEMSDAEIMKMYKGNKLKYAIGCDPGMKTWNASVRRDLDTKEEVNLRISSKRYHWDAKQGRRDAKAERITRLFTYDEKADRNRVAATLGTMPSPRETSWRSYIEHRLRVMNDGIETYTCKQYARLGLDKHIDSVRAIDKTACKLTRNQPSIFYMGASGSTPANSPIKIKKHVRCPGTRKLIAAIMKRGNCIIRMVDEYITSQHCPLCFKRFPQETRRDRYKKCVGCVPNPIVGLPRTIVTNVSKRLLQMRRTIERMWREMRDIGDVIAATLRDGPNAGRLVSKKQRFFKTWLPNVAHVEIEGAAGAKPSLTTVWHRDIAAAKLILYKDMQLIEIDTN

SEQ ID NO: 3371 - protein, 415 aa, Contarinia nasturtii
MPRDPWTHAQHNAFWRRFVNLDKINKPSQQFDFSFTTDGCSAHLKMIRRTRNVNTNTNNNNNNDDAVPNPEQPDPVPPIIQRAYDSGQIERIIGCDPGYREFVGVVRKDLATDNEENFLKSSKEWHHMTGFFDRQYKLKRFTGEFEKKCRKLRENREMYEEMPSKKSADYRTYLDYQLDIFNESCEIKYQKRVVRLKFDAYTRTQVALHVLVKQMTKVDRRMSDAEKTVILAFGGAKFASNSPIKGYLRCPHRALQQMAREYVFVLPINEHNTSQKCSRSGRKLKKRRSVPERQSKDRFLVCPNCKPVEDGVFHDPIQWTGRVHRTFKKKHPKWKYRSICTFHRPVPEAEANPNPPPRQKKKRYQKQLERKTTVIFNRDINAARNMIKKGLYMLNHLPMPNCFRPFRHQLHYYYN

SEQ ID NO: 3372 - protein, 549 aa, Contarinia nasturtii
MLYDMVNDLNVFPEIDLHDLTTDEKHWFKAMPMFLSMQREIEEYNLEWPHQHRSKRKKRKRKKSKRRPKRKQMLDDLKFRPFIRNLVVVPMCDFRRKHFKIDCSSMHQVLSSQKLLPKVEVENKNGTTSMVILPQKGFNDARDHWWNQYFYMRKIRRFVRGKKKFDFSINTDGIAVSLQYSAKKKTNNTEYDRSRIVEMILDGKFENFAGVDTGLKSWNTTVTHNIITGTETNFVMSSKQFHWQTGQNVRNAKAKRWTKAFIEEERRDRENRELYPVMPSPKGSYWLNYIKHRVKMMKHGICAYSTAKYTRLALDKHIKSSSVVDNWVEKVTDKQSTLFLFGADGEVPSDSRISIKKYVRCPGVRKTLRSIKKRRNCVIDLVDEWGSSQTDARCMKRFQNQPKSARFKKCRCIPDARTLLPIKIVSKLGKKDLSEFRLLQRAMNEALEENEPLLSKVKSYYKNWQLNLECSVTWHRDVVAAKNILLKGLWTLLGLPIPDAINRYKARDAVAEAAEVAADVAEAAAAAAANVDNDVEMFEYDQQPADHAV

SEQ ID NO: 3373 - protein, 213 aa, Contarinia nasturtii
MESNQVNDNIAVTVTNNEPSIIIFGASEMPPNRPFGLKRRKRCPGSRKFLVSVKKLGHSVVKMEDEWVTSQTCANCQERFPANTKPHRFKVCYGCKAKPIARLPDSFASLPDIIVATVSKRALQKGRKEIKRRIRNGNYQDVEKILRNGRLMSKVKVTYKNWPLNVQGDVASPQTAVWHRDIVAAKCIMLKGLCRMFGVPVPDSLRRPPNNVN

SEQ ID NO: 3374 - protein, 221 aa, Contarinia nasturtii
MVRNEPSIFYMGASGSTPANSPIRIKKYYSIITHNISKCNCIIRMVDEYMTSQHCPLCFKRFPQDTRRDRYKKCVGCVPNPIVGLPRTIVTNVSKRLLQMRRVIERMWREMQEMGDEIAATLRDGPNAARLVSKKQRFFKTWLPNVANVEMLHRDIAAAKPILYKGECVVLKRIIHPNVRRPPRVVNNQHLPLYCGQNQNINNGQSNHNLKISYNNYLLVR

SEQ ID NO: 3375 - protein, 226 aa, Contarinia nasturtii
MCGMVLSDSNIGQQSKYNTYKNHHATHCNAGNLVNHHQSSQILQLTSSVSRTPKPEIENTELHRQRIKQKLENNEYKYIVAIDPGMKTYLAGIRRNIEDRTEENFKISSKSYHWGAGQKVRDKMGKRMTARFTQREQLDRESYPSIPSPRGIRWRNYVRHRLTMVKDAVAAYARRRYARLSFDKYIGSQGEKDCLAKVITKNEPSLINIGAVDMAPNSLIGIKKGK

SEQ ID NO: 3376 - protein, 549 aa, Contarinia nasturtii
MLYDMVNDLNVFPEIDLHDLTTDEKHWFKAMPMFLSMQREIEEYNLEWPHQHRSKRKKRKRKKSKRRPKRKQMLDDLKFRPFIRNLVVVPMCDFRRKHFKIDCSSMHQVLSSQKLLPKVEVENKNGTTSMVILPQKGFNDARDHWWNQYFYMRKIRRFVRGKKKFDFSINTDGIAVSLQYSAKKKTNNTEYDRSRIVEMILDGKFENFAGVDTGLKSWNTTVTHNIITGTETNFVMSSKQFHWQTGQNVRNAKAKRWTKAFIEEERRDRENRELYPVMPSPKGSYWLNYIKHRVKMMKHGICAYSTAKYTRLALDKHIKSSSVVDNWVEKVTDKQSTLFLFGADGEVPSDSRISIKKYVRCPGVRKTLRSIKKRRNCVIDLVDEWGSSQTDARCMKRFQNQPKSARFKKCRCIPDARTLLPIKIVSKLGKKDLSEFRLLQRAMNEALEENEPLLSKVKSYYKNWQLNLECSVTWHRDVVAAKNILLKGLWTLLGLPIPDAINRYKARDAVAEAAEEAADVAEAAAAAAANVDNDVEMFEYDQQPADHAV

SEQ ID NO: 3377 - protein, 664 aa, Contarinia nasturtii
MEPEFRQFAQNLDDDHRFEWPNNKHFGNAMGDIIDIYENNLITNLNTHPGKRLREYLNMKVYKINSNPYSVFKFQEKDVSACIRLAIYGNDVVIRGMDDVAKRERVQWLMDYIRRICWWDIPNNNLGLFTKKQWFKSLQIWLTMQREIDEFNIDQELREERKEQRQEQRKQRRQKRKQDGQQQSNSSEDNAKNNVPKIKNLTVIPICQFKRKYFPIDTFTLYKILCGLKLMPKNDNEIQLTSKEFQRDKEWYWDKIFDMPKIKRLGKRKKMFHYRIMSDGEGVSLLYDIEREPFKPIDKAAIRKRFVENGPDKIKKLLGIDPNEKTLNATVQRDVETGKEVNIKISSKHYHWIAKQKVRNKKAKRYTKSFTQEEQNDRNNRALYPVMPSPMGKHWLCYVHHRLKMLDKGMEAYASDKYTRLCFDKYVESNSAIDQIAGMLVNYEAAVVYFGAAEISPNLPFHIKKHVRCPKMKNAFKKRGDCVIVPTDEYYTSQTCPKCLERFDPRTKSHRFKVCQDCKPHPAAMLPSMIVTQMGTRKLQTFRKIDRIANAEAEANHQNAGPLLSKVVVYRKIWLVNPDSGVLEYADTDAAQQQLSAAEQLNALVAAIEVEFIDFEGRIKRKTVWHRDIAAAKCIPIKGHFWLFDLEIPKTLQRPAPAAQNNQY

SEQ ID NO: 3378 - protein, 545 aa, Contarinia nasturtii
MVNDLNVFPEIDLHDLTTDEKHWFKAMPMFLSMQREIEEYNLEWPYQHRSKRKKRKRKKSKRRPKRKQMLDDPNFRPFIRNLVVVPMCDFRRKHYKIDCSSMHQVLSSQELLPKVEVENKNGTTSMVILPQKDFNAARDHWWNQYFYMRKIRRFVRGKKKFDFSINTDGIAVSLQYSAKKKTNSTEYDRSRIVEMILDGKFENFAGVDTGLKSWNTTVTHNIITGTETNFVMSSKQFHWKTGQNVRNAKAKRWTKKFTEEERRDRENRELYPVMPSPKGSHWLDYIKHRIKMMKHGICAYSTAKYTRLALDKHIKSSSVVDNWVEKVTDKQPTLFLFGADGEVPPDSRISIKKHVRCPGVRLTLRSIKKRRDCAIELVDEWGSSQTDARCMKRFQNQPKSARFKKCRCIPDARTLLPIKIVSKLGKKDLSEFRLLQRAMNEALEENEPLLSKVKSYYKNWQLNLECSVTWHRDVVAAKNILLKGLWTLLGLPIPDAINRYKARDAVAEAAEEAADVAEAAAAAAANVDNDVEMFEYDQQPADHAV

SEQ ID NO: 3379 - protein, 716 aa, Contarinia nasturtii
MNVGINNGDFSFFANSGEEKINTCFSQVLAKHNPTNPKPKKTPKPKPKPEPKPEPEQPSKTKRKPRGPAKEIPPIDPEFKAIVEGLDEVHRFDWPSNKDFGNGLKHLCNQYIDNNVTNSQTHADKHITQYLKMKVFQMNTNEAIEEKYLPSDIDCVVKLILKEKVIKVPASDPNKLYRCGVLYDIVNKLNVFPEIDLHDLTTNSKNWFKAVPMYLSMQREIEEFNLLRAHQEPPKKRKKRKRRRPKGKKRQWIIKRKQMLDDLEYLPCIRNLVVVPMCDFRRTHFRIDCSSMYQILSSQKLIPKQLTEDGKPSDKNISQKVFNENKDYIWNQYFYMRKIRWFVRRKKKFDFSINSDGIAVSLQYSTKKKKTSNTQSGTSRLDIIDMLKAGRFKRLGGTDSGMRNWNTTTIHEIDTCKEINFVKKSKQFHWETHQNVRNAKAKRFTKNFIEKERQDRENRELYAIMPSPKGSQWLSYIKHRVKMTKHGIEAYSTAKYTRLALDKYIGSNKVIDGFVNKITNKEPTLLFHGADGEVPPDCPIRIKKHVRCPGVRKLMQAYKKRPYIVVVPVDEWGTSQTDARCMCRFQNQPKSAKFKMCRCIPNAITLLPTKIVSKFGKTDTSTYRQLQRTLNGAFEIEEELMSRVKPYYKKWQLDLECTVTWHRDVVAAKNILLKGLWTLLGLPIPAAINRYWNQINADAAVFDDDNDVDISEPEFE

SEQ ID NO: 3380 - protein, 276 aa, Contarinia nasturtii
MCYIAYYVKMMKPAMAVYTTRQFIRLRLDKYIEENRASDKIAASLTKKKSALVFIGAAQIAPNSPIGIKKRLRCPGLRRLLNSFKKLGNCIVRLVDEYNTSQTCAKCFRPFDRRTKSDRYKVCQHCIPSEDESSQWNSPNVIITMKSNRVYQQLRKYAVDFVNRLNAANPDHIPMDSDGLVSKLQVCFKNWQLNTGIWKDDRAPFQLKTVWHRDIIAAKNIMYKGLCTVLGLEIHPQLLRPQNQNAAVQNQAADDEDSSDDEDYVYVLDVSDDDQF

SEQ ID NO: 3381 - protein, 723 aa, Contarinia nasturtii
MSRTRSREDQFNIPPERKDDIKNLVVIKQGVKSIIREEYRDRVIQFLDHRSYKMTLISSLASLLALYKIQEAIDDGNQQFFVQNGKTFFIECFNGVLADKVDREELMPPAFRNIVEAHFGVENFEWPDKECLGNGFNYFYQDHIRNNQTNLNTHCSEHVESFFQMKRWYYNMNINGHQYNGSKFDGIDIRNAKVYATSNKDLTHGDVERTNKMNILLYELERIGWQCQKVHNEQLVPVTVNEFVKDNWFQSLWMFGQMQRQIEVFHQYSQQWHAFRRDGLITNNRPPKVNNFALVPLCRFQLKNVRLDMTDMYYLANTVLGVVPSSRNPLTNRMNKYTLDYYLYGHRDELWNLVFDMDKIKQIGKQKRFHSQIITNSVCVSILYEKPAKAWVENSEQATFNNMTYASAIDPNEKTWVAVVRRHIKSNIEENIKISNPRFHWQTEQKKRDRKADRLTWWFVEEEQMDFKSYPVIPSPRGSTWKAYILHRIKMLRMGMQAYATRKYARLDLDHHIKATKTSDKVAMRVTNNKPSWIWIGAGEMAPNRPWGIKKRKRCPGTRKLATSFKKQEHTKVSFQDEWGTSITCANCHERFPRETKNHRFKICRNCIPKPIVGLPPIIVTNLSRQELKKERIVERAINPDRENIERLVPKIKVIFKTWSLTREYHELGDAEPENMIEHVVIWHRDIVAAKNILFKGMCRLFGIPLPDSLKRPDNPHHANNVN

SEQ ID NO: 3382 - protein, 226 aa, Contarinia nasturtii
MASRQVHYQRRVARLELDKHIRRQVAAHQVARDMTLLEKEIPKAQQTIVYALGDAKIGANSPIKGHCRTPQAFITHTIDRYCRIMAVHEPGTSMLCSRDHDILDQPLHRERPENMNPKDRFLVCNNCEPALNHVLPPPNEWIGKIHHTFRSKHRLELEPNLKHYGHSIANQQYNGRKQTIVFDRDLNASRNMIYKSLCMIQDIPINGDFNRSAAYLRQRAANAAAH

SEQ ID NO: 3383 - protein, 367 aa, Contarinia nasturtii
MERHRSQTRSIRQRENITIDGPKYHFKAKYGKRKRKSDQWTELLQKQRELEYKRYAFFPKGRSHWMCYIAYYVKIMNPAMAVYTARKFIRLHLDKYIEENQASDKIAASLTKKKSALVFIGAAQIAPNSPIGIKKGLRCPGLRRLLNSFKKLGNCIVRLVDEYNTSQTCAKCFRPFDRRTKSDRYKVCQHCIPSEDESSQWNLPNVIITMKSNRVYQQLRKYAVDFFNRLNVANPDHIIMDSDGLVSKLQVCFKNWQLNTGIWKDDRAPFQLKTVRHRDIVAAKNIMYKGEKISLKLKMFKNVLANNLLFTILFLGLCTVLGLDIHPQLLRSQNQNAAVQNQAADDGDSSDDEDYVYVLDVSDDDQF

SEQ ID NO: 3384 - protein, 678 aa, Contarinia nasturtii
MSTTGETTAATAPRKKRYKFQTNAQKEKDADDDVNDNGLFAIKMRLNTILRPEFNHIVKPWIEQKSIMSTKITVLASLLFLDKVKSAQMNRQWEFFKNRTYPAKKGKKKGQLVEKNRGEEVIEQCFYAVLQKNKEGENMEPHFRQFVEELSPENNFAWPKNDYFGNHFKTLCQNHTRCLKTGQKTHCKKKLKNYLRMRAWQFNAVSTGWKFDKKDIDNAVDLMIRGYNAIRDTHQNADFKRHKRTLLTGMVTAIVREVGGPTNDHNIKDFSKGDYWFKATAMWLVMQTEIDEWHNWAQDNNVKIPNIKNLSVVPLPDYQRKAVFMCNDVFYRMLAESKQLPQVDGRQATESYIRQNKEFYWNQVFDLTTINRKLKKNKEFHYTIVSNGESVSIMYRMSKQYEQQMQNDDILRKQFMGGKFAYELGIDPGMKTWNATVRRNIETKKEVNLKTSSKKYHWLAKQKTRDVKAKRWTKQFTQEEQDDRNNRQLYQRMPSPLGILWIDYVHHRIKMLKKGMAVYTTPKYTLLQFDKYVESNRTVDKLTGNLVNHKAAIIHMGNAEISPNSCIRIKKHVRAPGTRKLLKGFRKRRNCRVRKTDEWGTSQHCAKCGRRFDPATRSHRFKVCENCGAEPDSIFAEYLPSKIVAQRSKRQLRYNKDVVELYLMRFWAEGLMTEQEFE

SEQ ID NO: 3385 - protein, 766 aa, Contarinia nasturtii
MDDDELDDNQPEESKYVVIKCGLQTILRQQHERIERVGEVVTKMLFERSVQMTEVAALASLSILFILNEALDNDDRAFFLKPHPSLFIADCFRAVLNQHVNNIRSQYRILPEFRFMVERNSEEQFRWPDDEKLGNGLRYFYKQYITNIQTNTNTWCEKRLENFFRMRCWYRNRFHNGSRFDNIDIRNAKEFSYRFKNLTNGNNGNNVDPQRVEKFNILMRDLTEIGWSGTVSMKFFAKYRWFESLWLFGQMQRQIEVYHSHAEQWHTIHEMFRNNPNFQEPTINRPPKISSFALIPLCDYHLKNVRLDIKDLYYKIVNELDLVPSFLNTRTNRMNKRNLKYYTQTDRSGLWNMLFDVGEINKLGKSKSFHHQILTDSVSISIMYKKPQRQQRPQRQQRPQQTTQANRGPEKLIGKKYIIGIDPNEKSWLTVVRRNIQKTPDEPAVEENIIIPNQRFHWETKQKKRDKEAKKLAGWFDIEEKEHLKTYPYRPPSPRNSTWKSYIEYRIKMLRKGMAAYATREYARLDLDHHIRSTRVNDQIAVRVTNNKPSLVQFGAWAMKPDRPFGIKKRKRCPGSRKFRVSIKKLGHSEVEMQDEWGTSQTCANCQERFPRHTKDDRFKVCYDCRAKKIDGLPDSVAGLPDIIVSTVNRRVLRRKRAIIKRQIIDGNREAVNEKLRTGRLMSKVKVTYKNWPLNVDDDDVVPQTVTWHRDIVAAKCIMLKGMNQLETEYSLFNVFALNYIGLCRIFDVPLPVSLLRPPDQNNNVN

SEQ ID NO: 3386 - protein, 789 aa, Contarinia nasturtii
MSTTGETTAATAPRKKRYKFQTNAQKEKDADDDVNDNGLFAIKMRLNTILRPEFNHIVKPWIEQKSIMSTKITVLASLLFLDKVKSAQMNRQWEFFKNRTYPAKKGKKKGQLVEKNRGEEVIEQCFYAVLQKNKEGENMEPHFRQFVEELSPENNFTWPKNDYFGNHFKTLCQNHTRCLKTGQTTHCKKKLKNYLRMRAWQFNAVSTGWKFDKKDIDNAVDLMIRGYNAIRDTHQNADFKRHKRTLLTGMVTAIVREVGGPTNDHNIKDLSKGDYWFKATAMWLVMQTEIDEWHNWAQDNNVKIPNIKNLSVVPLPDYQRKAVFMCNDVFYRMLAESKQLPQVDGRQATESYIRQNKEFYWNQVFDLTTINRKLKKNKEFHYTIVSNGESVSIMYRMSKQYEQQMQNDDILRKQFIGGKFAYELGIDPGMKTWNATVRRNIKTKKEVNMKTSSKKYHWLAKQKTRDVKAKRWTKQFTQEEQDDRNNRQLYQRMPSPLGILWIDYVHHRIKMLKKGMAVYTTPKYTLLQFDKYVESNRTVDKLTGNLVNHKAAIIHMGNAEISPNSCIRIKKHVRAPGTRKLLKGFRKRRNCRVRKTDEWGTSQHCAKCGRRFNPATKSHRFKVCENCGAEPDSIFAEYLPSKIVAQRSKRQLRYNKDVVELYLMRFWAEGLMTEQEFDIAAERLLSKVAVYPKNWQVNTVSGKLEYAQVNADAPYATVQQPYAVDDENELEIEDKQLLMAVHKTSWDRDIVAAKCILIKGHCELFGWDIPAGLDRRSPRQPAVQPNQQP

SEQ ID NO: 3387 - protein, 789 aa, Contarinia nasturtii
MSTTGETTAATAPRKKRYKFQTNAQKEKDADDDVNDNGLFAIKMRLNTILRPEFNHIVKPWIEQKSIMSTKITVLASLLFLDKVKSAQMNRQWEFFKNRTYPAKKGKKKGQLVEKNRGEEVIEQCFYAVLQKNKEGENMEPHFRQFVEELSPENNFAWPKNDYFGNHFKTLCQNHTRCLKTGQKTHCKKKLKNYLRMRAWQFNAVSTGWKFDKKDIDNAVDLMIRGYNAIRDTHQNADFKRHKRTLLTGMVTAIVREVGGPTNDHNIKDFSKGDYWFKATAMWLVMQTEIDEWHNWAQDNNVKIPNIKNLSVVPLPDYQRKAVFMCNDVFYRMLAESKQLPQVDGRQATESYIRQNKEFYWNQVFDLTTINRKLKKNKEFHYTIVSNGESVSIMYRMSKQYEQQMQNDDILRKQFIGGKFAYELGIDPGMKTWNATVRRNIETKKEVNLKTSSKKYHWLAKQKTRDVKAKRWTKQFTQEEQDDRNNRQLYQRMPSPLGILWIDYVHHRIKMLKKGMAVYTTPKYTLLQFDKYVESNRTVDKLTGNLVNHKAAIIHMGNAEISPDSCIRIKKHVRAPGTRKLLKGFRKRRNCRVRKTDEWGTSQHCAKCGRRFNPATRSHRFKVCENCRAEPDSIFAEYLPSKIVAQRSKRQLRYNKDEVELYLMRFWAEGLMTEQEFDIAAERLLSKVAVYPKNWQVNTVSGKLEYAQVNADAPYATVQQPYAVDDENELEIEDKQLLMAVHKTSWDRDIVAAKCILIKGHCELFGWDIPAGLDRRSPRQPAVQPNQQP

SEQ ID NO: 3388 - protein, 548 aa, Contarinia nasturtii
MKVFQMNTNEAIDEKYLPSDIDCVVKLILKEKVIKVPASDPNKLYRCGVLYDIVNKLNVFPEIDLHDLTTNSKNWFKAVPMYLSMQREIEEFNLLRAHQEPPKKRKKRKRRRPKGKKRQWIIKRKQMLDDLEYLPCIRNLVVVPMCDFRRTHFKIDCSSMYQILSSQKLIPKQLTEDGKPSDKNISQKVFNENKDYIWNQYFYMRKIRWFVRRKKKFDFSINSDGIAVSLQYSTKKKETSNTQSGTSRLDIIDMLKAGRFKRLGGTDSGMRNWNTTTIHEIDTCKEINFVKKSKQFHWETHQNVRNAKAKRFTKNFIEKERQDRENRELYAIMPSPKGSQWLSYIKHRVKMTKHGIEAYSTAKYTRLALDKYIGSNKVIDGFVNKITNKEPTLLFHGADGEVPPDCSIKIKKHVRCPGVRKLMQAYKKRPYIVVVPVDEWGTSQTDARCMCRFQNQPKSAKFKMCRCIPNAITLLPTKIVSKFGKTDTSTYRQLQRTLNGAFEIEEELMSRVKPYYKKWQLDLECTVTWHRDVVAAKNILLKGLWTLL

SEQ ID NO: 3389 - protein, 726 aa, Contarinia nasturtii
MSGRKRNHESAFKPRKKIKIKEHQTIKKSARKGLKVNLPINTGKFAQLIDVYVLEMTRCYILGALNLHYFTSDHFKRSTDEQIEAFYTQFVDKKFFRDWFYGVQFIEHAFNDARESGYRLCYGIWYYCQKYGVRAPVIGGFGNVVEYAVQMFYTNYKNNICMHAHSRIRKFFTHQNASKAQIDDTMDFLFKQNSNCVPDLDLMWELENTLKPIRFDDGKGYIRNHERERKAALKRGERTELREYRNFTVVPTSSFERHYIRIDRRVFYRMLRQIECPHRLFRNKNGGPKQEEEIKNKEWDVLWRLYFDIDSIEREPRNKNDGHATIKFDNSIQTDGVGMSFLMERTKFIIEKDDEERMKETQEMLLKSQQVYGLDPGLRLVIGGVRINNFNDRNNRTETIIRLTSGQYQDMINSSRRNKWRKKLTTEIDEKMRLHRESFDEQPGPRAEDHKSYADHILRHFEEKFTAYTQYEYALQAFLQYIDTNRALDAYATKLIDGKQTFIFVGDRFIAADSPARGYIRSKVRDLFEKLKRRRKCTVVEVDEFRTTKLCSLCFRELEKPTKRGKVKEKYRYLTCHGCEPLCGENVLGKAQGPIESRKSNRKLTQQRKHRPRTDGPRMASKFRKYEEKTRIGRTITWNRDANAGRNILYKGWCAVMNIELHPAFQRHVEEEEENAGGGDPPPAPPAPPAPPARARQSRRAASNQNQQTTQRTLRSHLDQARSSRP

SEQ ID NO: 3390 - protein, 545 aa, Contarinia nasturtii
MVNDLNVFPEIDLHDLTTDEKHWFKAMPMFLSMQREIEEYNLEWPYQHRSKRKKRKRKKSKRRPKRKQMLDDPNFRPFIRNLVVVPMCDFRRKHYKIDCSSMHQVLSSQELLPKVEVENKNGTTSMVILPQKDFNAARDHWWNQYFYMRKIRRFVRGKKKFDFSINTDGIAVSLQYSAKKKTNSTEYDRSRIVEMILDGKFENFAGVDTGLKSWNTTVTHNIITGTETNFVMSSKQFHWKTGQNVRNAKAKRWTKKFTEEERRDRENRELYPVMPSPKGSHWLDYIKHRIKMMKHGICAYSTAKYTRLALDKHIKSSSVVDNWVEKVTDKQPTLFLFGADGEVPPDSRISIKKHVRCPGVRLTLRSIKKRRDCAIELVDEWGSSQTDARCMKRFQNQPKSARFKKCRCIPDARTLLPIKIVSKLGKKDLSEFRLLQRAMNEALEENEPLLSKVTSYYKNWQLNLECSVTWHRDVVAAKNILLKGLWTLLGLPIPDAINRYKARDAVAEAAEVAADVAEAAAAAAANVDNDVEMFEYDQQPADHAI

SEQ ID NO: 3391 - protein, 653 aa, Contarinia nasturtii
MIANDQFEWPSRYQMGNAFEYLNQQYLSNVTTNLTTHLDNILENFLQMIRYKLNEDPNRLIKFDGIDIRNAKNNLMFNQDCTGGDQHRTNKMNELYEQVAVRCLPSFRERLSMIEYIEKKWFESLWFFIFIQREISIFLEEHHDLVQLWLRHQRHPLFYCKPSKPLPPKIRNFTVIPICDSKLKHIKFDQDDLMSLLAQWKVVPKIFNNDHGGHNMYSRNYYKENEDEAWVILFNMDKINEIKKPNQQFHHMIVCDSVSASVVYRTPKPEIENTELHRQRIKQKLENNEYKYIVAIDPGMKTYLAGIRRNIEDRTEENFKISSKSYHWGAGRKVRDKMGKRMTARFTQREQLDRESYPSIPSPRGIRWRNYVRHRLTMVKDAVAAYARRCYARLSFDKYIGSQGEKDWLAKVITKNEPSLINIGAVDMAPNSPIGIKKGKRCPGTRHLQCSVKKLGHSDVHKVNEDFTSQHCANCQKKFPIQTQKYRFKVCRNCTRDAPIPQEIEPYISLPRLIVTKKSQRRKKKDSCVKKLIARGIMDPANQPAEFQPGRLESKKMYFLKNWLLNPVNAIQMGGDADKYPEQQKQQQHQKRFCTVWHRDIVAARCIMYKGLCYIFNLEMHNSYVRAPAPPRPPLRRGQPARKRANANVVPDQ

SEQ ID NO: 3392 - protein, 354 aa, Contarinia nasturtii
MSFWMERTKFVVVKDENEIMRETQEKLLKAQQVYGLDPGLRLVIGGVCVTNYNDPNKENRREKLVRLISGQYNHMIGYRKRNKWRKKLTFNIDEKMRIHRESFDEQPSPHSDNIDRYVDHFLRHFNEKFEAYTQYEYALQDFLQYIDTNKTLDNLADWLIDGKETFVFVGENFIAADSEAKGYIRSKVRDLFEKMKRRRNCAVVKVDEFRTTKVCSLCFKDLEFPKKGDRVKMKYRYFTCRGCEPLPEGNKPHGPIDSRKGNHLLTKQRKHRPRPGPRMASKFRRYEEKRTIGRTIKWNRDTNAGRNILYKGRCAVMNEELHPVFQRPTVPIQNQQPIQGTSRSIQDQAQNSRP

SEQ ID NO: 3393 - protein, 245 aa, Contarinia nasturtii
MEWYIEYRIKMLRKGMSAYATRKYSRLDFDYYMKSNQVNDNIAVTVTNNEPSIIVFGASEMPPNRPFGLKRRKRCPGSRKFLVSVKKLGHSVVKMEDEWGTSQTCANCQERFPANTKPHRFKVCYGCKAKPIAGLPDSVASLPDIIVATVSKRALQKGRKEIKRRIRNGNYQDVDEIIRNGRLMSKVKVTYKNWPLNVQGDVAAPQTVVWHRDIVAAKCIMLKGLCRMFGVLVPDSLRRPPNNVN

SEQ ID NO: 3394 - protein, 259 aa, Contarinia nasturtii
MYKKPKVPPVETTDDEIKAMYDSNELKYAVGCDPGMRTWNASVRRDLHTKEEVNLRISSKRYHWDAKQGRRNAKAERITRLFSFEEQADRNRIAAMIGERPSLKGPSWRSYIEHRLRVMNDGIETYSTKQYARLGLDKHIESVRAIDKTACKMVHNQPSIFYMGASGSTPANSPIKIKKHVRCPGTRKLLAAIMKRGNCIIRMVDEYMTSQHCPLCFKRFPQQTRRDRYKTCVGCVPNPIVGLPRTIVTNVSKRLLQMR

SEQ ID NO: 3395 - protein, 285 aa, Contarinia nasturtii
MIGEMPSPKGPSWRSYIEHRLRVMNDGIETYSTKQYARLGLDKHIESVRAIDKTACKMVHNQPSIFYMGASGSTPANSPIKIKKHVRCPGTRKLLAAIMKRGNCIIRMVDEYMTSQHCPLCFKRFPQETRRDRYKKCVGCVPNPIVGLPRTIVTNVSKRLLQMRRTIERMWREMRDIGDVIAATLRDGPNAGRLVSKKQRFFKTWLPNVANVEIEGAAGAQPTLTTVWHRDIAAAKLILYKGECVVFKRTIHPNVRRPRRVDNNQPLPLYRGQNQNVNNGHLQPQ

SEQ ID NO: 3396 - protein, 396 aa, Contarinia nasturtii
MYRMSKQHKQQMQNDDILRKQFIDGKFAYELGIDPGMKTWNATVRRNIETKKEVNMKTSSKKYHWLAKQKTRDVKAKRWTKQFTQEEQDDRNNRQLYQRMPSPLGILWIDYVHHRIKMLKKGMAVYTTPKYTLLQFDKYVESNRTVDKLTGNLVNHKAAIIHMGNAEISPNSCIRIKKHVRAPGTRKLLKGFRKRRNCRVRKTDEWGTSQHCAKCGRRFNPATRSHRFKVCENCGAEPDSIFAEYLPSKIVAQRSKRQLRYNKDEVELYLMRFWAEGLMTEQEFDIAAERLLSKVAVYPKNWQVNTVSGKLEYAQVNADAPYATVQQPYAVDDENELEIEDKQLLMAVHKTSWDRDIVAAKCILIKGHCELFGWDIPAGLDRRSPRQPAVQPNQQP

SEQ ID NO: 3397 - protein, 200 aa, Contarinia nasturtii
MRVTNNKPSWIWIGAGEMAPNRPWGIKKRKRCPGTRKLATSFKKQEHTKVSFQDEWGTSITCANCHERFPRETKNHRFKICRNCIPKPIVGLPPIIVTNLSRQELKKERIVERAINPDRENIERLVPKIKVIFKTWSLTREYHELGDAEPEDMIEHVVIWHRDIVAAKNILFKGMCRLFGIPLPDSLKRPDNPHHANNVN

SEQ ID NO: 3398 - protein, 651 aa, Contarinia nasturtii
MEPHFRQFVEELSPENNFAWPKNDYFGNHFKTLCQNHTRCLKTGQKTHCKKKLKNYLRMRAWQFNAVSTGWKFDKKDIDNAVDLMIRGYNAIRDTHQNADFKRHKRTLLTGMVTAIVREVGGPTNDHNIKDFSKGDYWFKATAMWLVMQTEIDEWHNWAQDNNVKIPNIKNLSVVPLPDYQRKAVFMCNDVFYRMLAESKLLPQVDGRQATESYLRQNKEFYWNQVFDFTTINRKLKKNKEFHYTIVSNGESVSIMYRMSKQYEQQMQNDDILRKQFIGGKFAYELGIDPGMKTWNATVRRNIETKKEVNLKTSSKKYHWLAKQKTRDVKAKRWTKQFTQEEQDDRNNRQLYQRMPSPLGILWIDYVHHRIKMLKKGMAVYTTPKYTLLQFDKYVESNRTVDKLTGNLVNHKAAIIHMGNAEISPNSCIRIKKHVRAPGTRKLLKGFRKRRNCRVRKTDEWGTSQHCAKCGRRFNPATRSHRFKVCENCGAEPDSIFAEYLPSKIVAQRSKRQLRYNKDEVELYLMRFWAEGLMTEQEFDIAAERLLSKVAVYPKNWQVNTVSGKLEYAQVNADAPYATVQQPYAVDDENELEIEDEQLLMAVHKTSWDRDIVAAKCILIKGHCELFGWDIPAGLDRRSPRQPAVQPNQQP

SEQ ID NO: 3399 - protein, 750 aa, Contarinia nasturtii
MRYLFSDEAENPNFYKKKPQSKRPPRKKANDDEAAKRKKRQNEKKVKKPKRKRDPILLTPAIERLLKRIQTDFNPMDFEANRRGYFNKLTTNWYRHVPFFVRLQQYCRARNRERCLMINKQMDEDEKNQPAEVAAAKAKLQAEAAAKIHKTITQNKSKSKSICRPIAEYVPRKRLPGVKYTWVRCAPNLTVYQVIPEARFGHIYIQIDKRGLFEILKRLKNPKEPEMKKNNGSNKRWEQPFNGNKELWDRMWRKYFGISKIERHSAGLTFANRIQTDGNAFVFLMNKEKKTKKKNDATDAETKERLQNILRHCDREVSFDVGDREIIAGQIIDREKDDTGAVKVKSVRNFKISSKQYHWMTKLPQFKKQRDRLVGTLEDDRADDRERIERECENHVQPSSRTIDFKTYADHTLRFFNRAMDVYGSEAYVLTNFLHWIEIHRTIGELVRMIVAQGHGKHTFVFVGKAPFTHANSPCKGYVRTSVRLLFKALEQHPQCTVRYVDEYRTTKLCSRCFNVLENGSRNGRKTTKSRFKVCRQCKPSPEALPDGGSFIYSHKNSKKLKKQKKYRPRYSNEDGRQPKVELKRFNMVDGMLVPAAENAAIVKRPRTHLRRRRLDVIAWKYIRNDDDIGDTTKVRSVTLNRDTNAGRNIRLRGHYELFGIKLPDAFTVDAETQNQHAERRFKQFDENKRKKQQKYQTSKNSNEAEYDSDQSWWSSSSEEDAIDLSNSELSDNSDDSNDSGSGSDDDGEN

SEQ ID NO: 3400 - protein, 773 aa, Contarinia nasturtii
MRRKRAKNGRSTSLKMTLNQVLREEYRAPFIDQVTYWCLSATMITTLASLLFLFKANKAFDDENVRFFKGESDEYTNDEFNKYVNGVIGECFTSVLQENYHKLPLAFRRTVEQACPDFLRPENWPAREGMGNAFNHLITQYITNVKNNIKVWAFSRIKKFFTLKRYELNLNRQGNLITELDVKRATKIVMFQSRVERNANIDLLLNEAAGIGLPINVHFQNLIRDRWFQTIPIFINIQRQIFDFHAKYEMLKQRWFQYRRDPNNNVMPTTPLPPKIKNFLVVPIHDFDMKHIRIDIHLFYLIARKFGALKLAKGKRGQPINIEKTEYDSNPAFYWNLIFDMPKISKLGNGKEFDFAVATDSVAVSLCFVKPERNTPELDNNTIKEKYNNFEFDYVLGIDPGVRTWNATVRKHVRSGNEENITIDGPKYHFKAKYGKRKRKSDQWTELLQKQRELDYKRYAFFPSPKGRSHWMCYIAYYVKMMKPAMAVYTTRKFIRLRLDKYIEENRASDKIAASLTKKKSALVFIGAAQIAPNSPIGIKKRLRCPGLRRLLNSFKKLGNCIVRLVDEYNTSQTCAKCFRPFDRRTKSDRYKVCQHCIPSEDESSQWNLPNVIITMKSNRVYQQLRKYAVDFVNRLNAVNPDHIPMDSDGLVSKLQVCFKNWQLNTGIWKDDQAPFQLKTVWHRDIVAAKNIMYKGEKISLKLKMFKNVLANNLLFTILFLGLCTVLGLDIHPQLLRPQNQNAAVQNQAADDEDSSDDEDYVYVLDVSDDDQF

SEQ ID NO: 3401 - protein, 232 aa, Contarinia nasturtii
MLRKGMAAYATREYARLDLDHHIRSTRVNDQIAVRVTNNKPSLVQFGAWAMKPDRPFGIKKRKRCPGSRKFCVSIKKLGHSEVEMQDEWGTSQTCANCQERFPRHTKDDRFKVCYDCRAKKIDGLPDSVAGLPDIIVSTVNRRVLRRKRAIIKRQIIDGNREAVNEKLRTGRLMSKVKVTYKNWPLNVDDDDVVPQTVTWHRDIVAAKCIMLKGLCRIFDVPLPVSLLRPPD

SEQ ID NO: 3402 - protein, 723 aa, Contarinia nasturtii
MSRTRSREDQFNIPPERKDDIKNLVVIKQGVKSIIREEYRDRVIQFLDHRSYKMTLISSLASLLALYKIQEAIDDGNQQFFVQNGKTFFIECFNGVLADKVDREELMPPAFRNIVEAHFGVENFEWPDKECLGNGFNYFYQDHIRNNQTNLNTHCSEHVESFFQMKRWYYNMNINGHQYNGSKFDGIDIRNAKVYATSNKDLTHGDVERTNKMKILLYELERIGWQCQKVHNEQLVPVTVNEFVKDNWFQSLWMFGQMQRQIEVFHQYSQQWHAFRRDGLITNNRPPKVNNFALVPLCRFQLKNVRLDMTDMYYLANTVLGVVPSSRNPLTNRMNKYTLDYYLYGHRDELWNLVFDMDKIKQIGKQKRFHSQIITNSVCVSILYEKPAKAWVENSEHATFNNMTYASAIDPNEKTWVAVVRRHIKSNIEENIKISNPRFHWQTEQKKRDRKADRLTWWFVEEEQMDFKSYPVIPSPRGSTWKAYILHRIKMLRMGMQAYATRKYARLDLDHHIKATKTSDKVAMRVTNNKPSWIWIGAGEMAPNRPWGIKKRKRCPGTRKLATSFKKQEHTKVSFQDEWGTSITCANCHERFPRETKNHRFKICRNCIPKPIVGLPPIIVTNLSRQELKKERIVERAINPDRENIERLVPKIKVIFKTWSLTREYHELGDAAPEDMIEHVVIWHRDIVAAKNILFKGMCRLFGIPLPDSLKRPDNPHHANNVN

SEQ ID NO: 3403 - protein, 510 aa, Contarinia nasturtii
MQRQIEVYHSHAEQWNTIHEMFRNNPNFQEPTINRPPKISSFALIPLCDYHLKNVRLDIKDLYYKIVNELDLVPSFLNTRTNRMNKRNLKYYTQTDRSGLWNMLFDVGKINKLGKSKPFHHQILTDSVSISIMYKKPQRQQRPQRQQRPQQTTQANRGPEKLIGKKYIIGIDPNEKSWLTVVRRNIQKTPDEPAVEENIIIPNQRFHWETQQKKRDKEAKKLAGWFDIEEKEHLKTYPYRPPSPRNSTWKSYIEYRIKMLRKGMAAYATREYARLDLDHHIRSTRVNDQIAVCVTNNKPSLVQFGAWAMKPDRPFRIKKRKRCPGSRKFRVSIKKLGHSEVEMQDEWGTSQTCANCQERFPRHTKDDRFKVCYDCRAKKIDGLPDSVAGLPDIIVSTVNRRVLRRKRAIIKRQIIDGNREAVNEKLRTGRLMSKVKVTYKNWPLNVDDDDVVPQTVTWHRDIVAAKCIMLKGMNQLETEYSLFNVFALNYIGLCRIFDVPLPVSLLRPPD

SEQ ID NO: 3404 - protein, 723 aa, Contarinia nasturtii
MSRTRSREDQFNIPPERKDDIKNLVVIKQGVKSIIREEYRDRVIQFLDHRSYKMTLISSLASLLALYKIQEAIDDGNQQFFVQNGKTFFIECFNGVLADKVDREELMPPAFRNIVEAHFGVENFEWPDKECLGNGFNYFYQDHIRNNQTNLNTHCSEHVESFFQMKRWYYNMNINVHQYYGSKFDGIDIRNAKVYATSNKDLTHGDVERTNKMNILLYELERIGWQCQKVHNEQLVPVTVNEFVKDNWFQSLWMFGQMQRQIEVFHQYSQQWHAFRRDGLITNNRPPKVNNFALVPLCRFQLKNVRLDMKDMYYLANTVLGVVPSSRNPLTNRMNKYTLDYYLNGHRDELWNLVFDMDKIKQIGKQKRFHSQIITNSVCVSILYEKPAKAWVENSEQATFNNMTYASAIDPNEKTWVAVVRRHINSNIEENIKISNPRFHWQTEQKKRDRKADRLTWWFVEEEQMDFKSYPVIPSPRGSTWKAYILHRIKMLRMGMQAYATRKYARLDLDHHIKATKTSDEVAMRVTNNKPSWIWIGAGEMAPNRPWGIKKRKRCPGTRKLATSFKKQEHTKVSFQDEWGTSITCANCHERFPRETKNHRFKICRNCIPKPIVGLPPIIVTNLSRQELKKERIVERAINPDRENIERLVPKIKVIFKTWSLTREYHELGDAAPEDMIEHVVIWHRDIVAAKNILFKGMCRLFGIPLPDSLKRPDNPHHANNVN

SEQ ID NO: 3405 - protein, 323 aa, Contarinia nasturtii
MLREIGCPHPRLIRRDGTPKQCKELKAADWDVLWRTYFDIGAIERTPQNDNRATLIFKNSIQTDGMAMSFWMERTKFVVVKDENEIMRETQEKLLKAQQVYGLDPSLQLVIGGVCVINYNDPNKENRREKLVQLTSGQYNHMISYRKRNKWRKKLTFNIDEKMRIHREYFDEQPGPHSDNIDRYVDHILRHFNEKFEAYTQYEYALQDVVQYIDTNTTLDKLADWFIDGKETFVFVGENFIAADSEAKGYIRSKVRDLFEKMKRRRNCTVVKVDEFRTTKVCTTGIKIPTLRRKTDNWSYYHMESWYKRRSQYTLQRTVCCNK

SEQ ID NO: 3406 - protein, 766 aa, Contarinia nasturtii
MDDDELDDNQPEESKYVVIKCGLQTILRQQHERIERVGEVVTKMLFERSVQMTEVAALASLSILFILNEALDNDDRAFFLKPHPSLFIADCFRAVLNQHVNNIRSQYRILPEFRFMVERNSEEQFRWPDDEKLGNGLRYFYKQYITNIQTNTNTWCEKRLENFFRMRCWYRNRFHNGSRFDNIDIRNAKEFSYRFKNLTNGNNGNNVDPQRVEKFNILMRDLTEIGWSGTVSMKFFAKYRWFESLWLFGQMQRQIEVYHSHAEQWHTIHEMFRNNPNFQEPTINRPPKISSFALIPLCDYHLKNVRLDIKDLYYKIVNELDLVPSFLNTRTNRMNKRNLKYYTQTDRSGLWNMLFDVGEINKLGKSKSFHHQILTDSVSISIMYKKPQRQQRPQRQQRPQQTTQANRGPEKLIGKKYIIGIDPNEKSWLTVVRRNIQKTPDEPAVEENIIIPNQRFHWETQQKKRDKEAKKLAGWFDIEEKEHLKTYPYRPPSPRNSTWKSYIEYRIKMLRKGMAAYATREYARLDLDHHIRSTRVNDQIAVCVTNNKPSLVQFGAWAMKPDRPFGIKKRKRCPGSRKFRVSIKKLGHSEVEMQDEWGTSQTCANCQERFPRHTKDDRFKVCYDCRAKKIDGLPDSVAGLPDIIVSTVNRRVLRRKRAIIKRQIIDGNREAVNEKLQTGRLMSKVKVTYKNWPLNVDDDDVVPQTVTWHRDIVAAKCIMLKGMNQLETEYSLFNVFALNYIGLCRIFDVPLPVSLLRPPDQNNNVN

SEQ ID NO: 3407 - protein, 723 aa, Contarinia nasturtii
MSRTRSREDQFNIPPERKDDIKNLVVIKQGVKSIIREEYRDRVIQFLDHRSYKMTLISSLASLLALYKIQEAIDDENRQFFLQNGKTFFIECFNGVLADKVDREELMPPAFRNIVEAHFGVENFEWPDKECLGNGFNYFYQDHIRNNQTNLNTHCSEHVESFFQMKRWYYNMNINGHQYNGSKFDGIDIRNAKVYATSNKDLTHGDVERTNKMNILLYELERIGWQCQKVHNEQLVPVTVNEFVKDNWFQSLWMFGQMQRQIEVFHQYAQQWHAFRRDGLITNNRPPKVNNFALVPLCRFQLKNVRLDMTDMYYLANTVLGVVPSSRNPLTNRMNKYTLDYYLYGHRDELWNLVFDMDKIKQIGKQKRFHSQIITNSVCVSILYEKPAKAWVENSEQATFNNMTYASAIDPNEKTWVAVVRRHIKSNIEENIKISNPRFHWQTEQKKRDRKADRLTWWFVEEEQMDFKSYPVIPSPRGSTWKAYILHRIKMLRMGMQAYATRKYARLDLDHHIKATKTSDKVAMRVTNNKPSWIWIGAGEMAPNRPWGIKKRKRCPGTRKLATSFKKQEHTKVSFQDEWGTSITCANCHERFPRETKNHRFKICRNCIPKPIVGLPPIIVTNLSRQELKKERIVERAINPDRENIERLVPKIKVIFKTWSLTREYHELGDAAPEDMIEHVVIWHRDIVAAKNILFKGMCRLFGIPLPDSLKRPDNPHHANNVN

SEQ ID NO: 3408 - protein, 730 aa, Contarinia nasturtii
MDDDELDDNQPEESKYVVIKCGLQTILRQQHERIERVGEVVTKMLFERSVQMTEVAALASLSILFILNEALDNDDRAFFLKPHPSLFIADCFRAVLNQHVNNINSQYRILPEFRFMVERNSEEQFRWPDDEKLGNGLRYFYKQYITNIQTNTNTWCEKRLENFFRMRCWYRNRFHNGSRFDNIDIRNAKEFSYRFKNLTNGNNGNNVDPQRVEKFNILMRDLTEIGWSGTVSMKFFAKYRWFESLWLFGQMQRQIEVYHSHAEQWYTIHEMFRNNPNFQEPTINRPPKISSFALIPLCDYHLKNVRLDIKDLYYKIVNELDLVPSFLNTRTNRMNKRNLKYYTQTDRSGLWNMLFDVGEINKLGKSKSFHHQILTDSVSISIMYKKPQRQQRPQRQQRPQQTTQANRGPEKLIGKKYIIGIDPNEKSWLTENIIIPNQRFHWETQQKKRNKEAKKLAGWFDIEEKEHLKTYPYRPPSPRNSTWKSYIEYRIKMLRKGMAAYATREYARLDLDHHIRSTRVNDQIAVCVTNNKPSLVQFGAWAMKPDRPFGIKKRKRCPGSRKFRVSIKKLGHSEVEMQDEWGTSQTCANCQERFPRHTKDDRFKVCYDCRAKKIDGLPDSVAGLPDIIVSTVNRRVLRRKRAIIKRQIIDGNREAVNEKLRTGRLMSKVKVTYKNWPLNVDDDDVVPQTVTWHRDIVAAKCIMLKGLCRIFDVPLPVSLLRPPDQNNNVN

SEQ ID NO: 3409 - protein, 718 aa, Contarinia nasturtii
MNVGINNGDFSFFANSGEEKINTCFSQVLAKHNPTNPKPKKTPKPKPKPEPEPKPEPELPSKTKRKPRGPAKEIPPIDPEFKAIVEGLDEVHRFDWPNNKDFGNGLKHLCNQYIDNNVTNSQTHADKHITQYLKMKVFQMNTNEAIEEKYLPNDIDCVVKLILKEKVIKVPASDPNKLYRCGVLYDIVNKLNVFPEIDLHDLTTNSKNWFKAVPMYLSMQREIEEFNLLRAHQEPPKKRKKRKRRRPKGKKRQWIIKRKQMIDDLEYLPCIRNLVVVPMCDFRRTHFKIDCSSMYQILSSQKLIPKQLTEDGKPSDKNISQKVFNENKDYIWNQYFYMRKIRWFVRRKKKFDFSINSDGIAVSLQYSTKKKETSNTQSGTSRLDITDMLKAGKFKRLGGTDSGMRNWNTTTIHEIDTCKEINFVKKSKQFHWETHQNVRNAKAKRFTKNFIEKERQDRENRELYAMMPSPKGSQWLSYIKHRVKMTKHGIEAYSTAKYTRLALDKYIGSNKVIDGFVNKITNKEPTLLFHGADGEVPPDCPIRIKKHVRCPGVRKLMQAYKKRPYIVVVPVDEWGTSQTDARCMCRFQNQPKSAKFKMCRCIPNAITLLPTKIVSKFGKTDTSTYRQLQRTLNGAFEIEEELMSRVKPYYKKWQVDLECTVTWHRDVVAAKNILLKGLWTLLGLPIPAAINRYWNQINADAAVFDDDNDVDISEPEFE

SEQ ID NO: 3410 - protein, 1126 aa, Contarinia nasturtii
MTKIIASNAAHRQIVETIANELSTQLNQFTRNIKLNSNVKRKVEDLVEKFERSHVEALQRLRNGFGICVDTNTTAASTVADRNDVSTPTSSGDTVASGTRPKQSQSNDSNARQKTIPAKRKKRAKTITNAPAPKKRTTRATSMPNTSNNDYVSDDFDFNDGDDDGDNGDEDSERYQSIKMGKRKSFNENLQNKDELASIINKIVTDMSHNWRLGALNVHCSLMRIIQSNSEAAIRTEFWNSTCEYNRNYFDGYFRGVYGNCINGKTKLRKTWKLDQAIIKFCQKHKVIEKNAIGYGNIFTYATRQYFTNFMMCIIRSLYNNVRAYLNHCVISEELANHAKSNEPVASTSRTKKPPLPPQKCRTLKQIRKANYQLITNTMRYLFSDEAENPDFYKKKPQSKRPPRKKANDDEAAKRKKRQNEKKVKKPKRKRDPILLTPAIERLLKRIQTDFNPMDFEANRRGYFSKLTTNWYRHVPFFVRLQQYCRARNRERCLMINKQMDEDEKNQPAEVAAAKVKLQAEAAAKIHNKSKAKSKSICRPIAEYVPRKRLPGVKYTWVRCAPNLTVYQVIPEARFGRIYIQIDRRGLFEILKRLKNPKEQEMKKNNGSNKPWQQPFNGNKELWDRMWRKYFGISKIERHSAGLTFANRIQTDGNAFVFLMNKEKKTKKKNDATDAETKERLQNILRHCDREVSFDVGDREIIAGQIIDREKDDTGAVKVKSVRNFKISSKQYHWMTKLPQFKKQRDRLVGTLEDDRADDRERIERECENHVQPSSRTIDFKTYADHTLRFFNRAMDVYGSEAYVLTNFLHWIEIHRTIDELVRMIVAQGHGKHTFVFVGKAPFTHANSPCKGYVRTSVRLLFKALEQHPQCTVRYVDEYRTTKLCSRCFNVLENGSRNGRKTTKSRFKVCRQCKPSPEALPDGGSFIYSHKNSKKLKKQKKYRPRYSNEDGRQPKVELKRFNMVDGLLVPGAENAEIVKRPRTHLRRRRLDVIAWKYIRNDDDIGDTTKVRSVTLNRDTNAGRNIRLRGYHELLGIKLPDAFTVDAKIQDQHAERRFKQFDENKRKKQQKYQTSKNSIEAEYDSDQSWWSSSSEEDAIDLSNSELSDNSDDSNDSGSGSSSDDGEN

SEQ ID NO: 3411 - protein, 766 aa, Contarinia nasturtii
MDDDELDDNQPEESKYVVIKCGLQTILRQQHERIERVGEVVTKMLFERSVQMTEVAALASLSILFILNEALDNDDRAFFLKPHPSLFIADCFRAVLNQHVNNINSQYRILPEFRFMVERNSEEQFRWPDDEKLGNGLRYFYKQYITNIQTNTNTWCEKRLENFFRMRCWYRNRFHNGSRFDNIDIRNAKEFSYRFKNLTNGNNGNNVDPQRVEKFNILMRDLTEIGWSGTVSMKFFAKYRWFESLWLFGQMQRQIEVYHSHAEQWYTIHEMFRNNPNFQEPTINRPPKISSFALIPLCDYHLKNVRLDIKDLYNKIVNELDLVPSFLNTRTNRMNKRNLKYYTQTDRSGLWNMLFDVGEINKLGKSKSFHHQILTDSVSISIMYKKPQRQQRPQRQQRPQQTTQANRGPEKLIGKKYIIGIDPNEKSWLTVVRRNIQKTPDEPAVEENIIIPNQRFHWETQQKKRDKEAKKLAGWFDIEEKEHLKTYPYRPPSPRNSTWKSYIEYRIKMLRKGMAAYATREYARLDLDHHIRSTRVNDQIAVRVTNNKPSLVQFGAWAMKPDRPFGIKKRKRCPGSRKFRVSIKKLGHSEVEMQDEWGTSQTCANCQERFPRHTKDDRFKVCYDCRAKKIDGLPDSVAGLPDIIVSTVNRRVLRRKRAIIKRQIIDGNREAVNEKIRTGRLMSKVKVTYKNWPLNVDDDDVVPQTVTWHRDIVAAKCIMLKGMNQLETEYSLFNVFALNYIGLCRIFDVPLPVSLLRPPDYNNNVN

SEQ ID NO: 3412 - protein, 281 aa, Contarinia nasturtii
MPSPRETSWRSYIEHRLRVMNDNIETYTCKQYARLGLDKHIDSVRAIDKTACKLTRNQPSIFYMGASGSTPANSPIKIKKHVRCPGTRKLIAAIIKRGNCIVRMVDEYMTSQHCPLCFKRFPQETRRDRYKKCVGCVPNPIVGLPRTIVTNVSKRLLQMRRTIERMWREMRDIGDVIAATLRDGPNAGRLVSKKQRFFKTWLPNVANVEIEGAAGAHPTLTTVWHRDIAAAKLILYKGECVVFKRTIHPNVRRPRRVDNNQPLPLYRGQNQNVNNGHLQPQ

SEQ ID NO: 3413 - protein, 636 aa, Contarinia nasturtii
MVERNSEEQFRWPDDEKLGNGLRYFYKQYITNIQTNTNTWCEKRLENFFRMRCWYRNRFNNGSRFDSIDIRNAKEFSYRFKNLTNGNNVDPQRVEKFNILMRDLTEIGWSGTVSMKFFAKYRWFESLWLFGQMQRQIEVYHSHAEQWNTIHEMFRNNPNFQEPTINRPPKISSFALIPLCDYHLKNVRLDITDLYNKIVNELDLVPSFLNTRTNRMNKRKVKYYTQTDRSGLWNMLFDVGKINKLGKSKPFHHQILTDSVSISIMYKKPQRQQRPQQTTQANRGPEKLIGKKYIIGIDPNEKSWLTVVRRNIQKTPDEPAVEENIIIPNQRFHWETQQKKRDKEAKKLAGWFDIEEKEHLKTYPYRPPSPRNSTWKSYIEYRIKMLRKGMAAYATREYARLDLDHHIRSTRVNDQIAVRVTNNKPSLVQFGAWAMKPDRPFGIKKRKRCPGSRKFRVSIKKLGHSEVEMQDEWGTSQTCANCQERFPRHTKDDRFKVCYDCRAKKIDGLPDSVAGLPDIIVSTVNRRVLRRKRAIIKRQIIDGNREAVNEKLRTGRLMSKVKVTYKNWPLNVDDDDVVPQTVTWHRDIVAAKCIMLKGMNQLETEYSLFNVFALNYIGLCRIFDVPLPVSLLRPPD

SEQ ID NO: 3414 - protein, 844 aa, Contarinia nasturtii
MTIDTRPSNQSVQSARPPQNHSSAAKRIKRSMTIDTRPSNQSVQSARQPQNHSVARRPPPVLPSTSTSTSAAQKGTKTYLFHPRICRRRGEQAKENIETFTIKMRLNQFLRSNANDEGRVGGSDNRRKINDARIAATIARRNDAARNQGNNQGNNVDQKSRLIKIINDKVTQMSDMIRLASLHLHNSLNRLVADGTNEEIRAEFGNEFNPRKHFYAQKQCQRNLDYPMNRDFENMLRERHIPVKPKIKNTGQCIKYAYLICATNMYVNVKMHCCRHIKDKFFKRLSNDEAAIDATMNYLKCADSVDRPDAYLLDQYFEHLRPLLDEERIDDYNYNYGGEEHIIPRGWLETTEDEKKYYKHVFELMNLLRYICEHNAQNPDKQWKLFRPIPQSHNKRHHIAIDTEAFILFTNLLFAINEGKTNLRAKDNWNEQEYCRFWNRFVNLRKVNRRSQEFDYRFTTDGETACLKMIRKTRGLGNSNAQETVTNSINHANESAIVPDDIQAAFDAGQIKKIIGNDPGAKVLIAANTLDLDRKTEVSYRLKAKQWHHRVGTHKRKKKLKEYTGAYENECRLLRENRNIYIETPSPSSLNYDLYLRYQLDIFQAASEVKYRPCVAKLKFDKYVQTQKTAHQIAREVTQMEKEIPREQQTIVYAHGNAKIAANSPIKGHLRTPEAAITHTIDRYAMRIDINERGTSMYCSRCQQMTQRPIDVRVRKGFTRHNIKDRFLVCQNCESGRNAVLPVPREYTVKTHRSYRKKIPVVGARPKTRTFETPADNPNRIRSVVMDRDHNASRNMIYKAKCMLSGIPINPVFNMSAVAYRQQNPDRVIRPNRPNHANRRNQAA

SEQ ID NO: 3415 - protein, 357 aa, Contarinia nasturtii
MLYDMVNDLNVFPEIDLHDLTTDEKYWFKAMPMFLSMQREIEEYNSMWPHQDRPKRKKRKRKKSKKKRKWCPKRKQMLDDPNFRPFIRNLVVVPMCDFCRKHFKIDCSSMHQVLSSQKLLPKVEVENKNGKTSIINIPQKDFNDASDHWWNQYFYMRKIRRFVRGKKKFDFFINTDGIAVSLQYSAKKKTNNEEIDRSRRIVQMIMDGKFKKFAGIDTGVRSWNTTVTHKIKSGKEINFVMSSKQFHWQTGLNVRNAKAKRWSKKFVQEERRDRENREIYPVMPSPKGSQWLNYVKHRSKMMKHGICAYSTAKYTRLALDKHIKSSSVVDNWVEKVTDKQPTLFFLVLMVKYHLTAQ

SEQ ID NO: 3416 - protein, 742 aa, Contarinia nasturtii
MKRRRAKINSAFKKNTAKLNDNEELRSIKLSAPSVFKSEYSEALTQHFFHKCYNGTVICYLGSTLFLYVVNLAADNDDRQYFIDSDGKNVIRECFAAVSRENLENPKQPKIPRGFLEMIADDQFEWPNNILESFLQMIRYQLNEDPNRLIKFDGIDIRNAKNNLMFNQDCTGGDQHRTNKMNELYEQVAVRCLPSFREYLSMIEYIEKKWFESLWFFIFIQREISIFLEEHHDLVQLWLRHQRHPLFYCKPSKPLPPKIRNFTVIPICDSKLKHIKFDQDDLMSLLAQWKVVPKIFNNDHGGHNMYSRNYYKENEDEAWAILFNMDKINEIKKPNQQFHHMIVCDSVSASVLYRTPKPEIENTELHRQRIKQKLENNEYKYIVAIDPGMKTYLAGIRRNIEDRTEENFKISSKSYHWGAGQKVRDKMGKRMTARFTQREQLDRESYPSIPSPRGIRWRNYVRHRLTMVKDAVAAYARRRYARLSFDKYIGSQGEKDWLAKVITKNEPSLINIGAVDMAPNSPIGIKKGKRCPGTRHLQCSIKKLGHSDVHKVNEDFTSQHCANCQKKFPIQTQKYRFKVCRNCTRDAPIPQEIEPYISLPRLIVTKKSQRRKKKDSCVKKLIARGIMDPANQPAEFQPGRLESKKMYFLKNWLLNPVNAIQMGGDADKYPEQQQQQQHQKRFCTVWHRDIVAARCIMYKGLCYIFNLEMHNSYVRAPAPPRPPLRRRQPARRRANANVVPDQ

SEQ ID NO: 3417 - protein, 534 aa, Contarinia nasturtii
MKFFAKYRWFESLWLFGQMQRQIEVYHSHAEQWNTIHEMFRNNPNFQEPTINRPPKISSFALIPLCDYHLKNVRLDIKDLYYKIVNELDLVPSFLNTRTNRMNKRNLKYYTQTDRSGLWNMLFDVGKINKLGKSKPFHHQILTDSVSISIMYKKPQRQQRPQRQQRPQQTTQANRGPEKLIGKKYIIGIDPNEKSWLTVVRRNIQKTPDEPAVEENIIIPNQRFHWETQQKKRDKEAKKLAGWFDIEEKEHLKTYPYRPPSPRNSTWKSYIEYRIKMLRKGMAAYATREYARLDLDHHIRSTRVNDQIAVRVTNNKPSLVQFGAWAMKPDRPFGIKKRKRCPGSRKFRVSIKKLGHSEVEMQDEWGTSQTCANCQERFPRHTKDDRFKVCYDCRAKKIDGLPDSVAGLPDIIVSTVNRRVLRRKRAIIKRQIIDGNREAVNEKIRTGRLMSKVKVTYKNWPLNVDDDDVVPQTVTWHRDIVAAKCIMLKGMNQLETEYSLFNVFALNYIGLCRIFDVPLPVSLLRPPDQNNNVN

SEQ ID NO: 3418 - protein, 300 aa, Contarinia nasturtii
MQRQIEVYHSHAEQWNTIHEMFRNNPNFQEPTINRPPKISSFALIPLCDYHLKNVRLDITDLYNKIVNKLDLVPSFLNTRTNRMNKRKVEYYTQTDRSGLWNMLFDVGKINKLGKSKPFHHQILTDSVSISIMYKKPQRQQRPQQTTQANRGSEKLIGKKYIIGIDPNEKSWLTVVRRNIQKTPDEPAVEENIIIPNQRFHWETQQKKRDKEAKKLAGWFDIEEKEHFKTYPYRPPSPRNSTWKSYIEYRIKMLRKGMAAYATREYARLDLDHHIRSTRVNDQIAVRVTNRRWFNLVLGR

SEQ ID NO: 3419 - protein, 739 aa, Contarinia nasturtii
MSGRKRKGVGAICGSRPKRRKVGKLPEESGLLAIKVSAATAVKEEYHDIVLPWIAKKSIECTKICELASLLFLHKVKLANEEAILTNNWKFFDEGDGIHIIEGCFFAVLRKYKEENDMVPEFRDIVEALDGDNRFAWPNNDYFGNLMRYLFQQHARNAITNLTTHDDKRLREYLRLLVWEHNVDNLDPNDVFDEHDVNNAVKWAIERYDSTRGDAIRLDKRNRLLTCVRNIGGPKDDNIAKDTKENWFATLPMWLHMQKKIDDYHNWVQNNLENIPADIELPIIKNLSVLPICTHLRKNIKINADILYRMMCETKIIPLDEYGRQVDGTHVCENKVHYFNEIFDMNKINGILNANKEFHYHVVTDGVSASILYDVSRNTLEQLVSDELIKKRYEDGVYIYELGIDPGMKTWNATVRRHIDSGKEMNFKTSSKKYHYLTKQGVRNRKAKRWTRGFVAFEQNDRNDRTRYPQMPSPKGENWRDYISHRLRIMKKAIDVYTSERYTRLRFDKYIESNRVCDKIAAMLTNGKPCIIFLGAANISPNSPIKIKKNIRCPGNRKLIKSFKKMLGNVVKMVNEFRTSRLCARCFEPFPLETLGHRFKVCEWCVPDNNDWPEGLKLPEKIVTMKSKRMLLSERQELRDAMVANPNQAVGFVSKVICYRKNWRQNAAYDAVNNVAQLPGIIRDENVIDFTEDYMLLDDDFYVAEEEAILNTIWHRDIAAAKLIIYKGNLFIELKLDSE

SEQ ID NO: 3420 - protein, 315 aa, Contarinia nasturtii
MNFKTSSKKYHHLTKQGVRNRKAKRWTRGFVAFEQNDRNDRTRYPQMPSPKGENWRDYISHRLRIMKKAIDVYTSERYTRLRFDKYIESNRVCDKIAAMLTNGKPCIIFLGAANISPNSPIKIKKNIRCPGNRKLIKSFKKMLGNVVKMVNEFRTSRLCARCFEPFPLETLGHRFKVCEWCVPDNNDWPEGLKLPEKIVTMKSKRMLLSERQELRDAMVAYSNQAVGFVSKVICYRKNWRQNAAYDAVNNVAQLPGIIRDENVIDFTEDNMLLDDDFYVAEEEAILNTIWHRDIAAAKLIIYKGNLFIELKLDSE

SEQ ID NO: 3421 - protein, 585 aa, Contarinia nasturtii
MGRHKKADPNADQRCIKQGLPSIIREQYRDVIVAIISYLSVKATKIACLASLLFLMKVNEALDDFNYDFFETDEPSTIIHNCFKAVLVDNIGNISLMLPGFRNIVDAAHIDWPTNGGFGNGFKYIWEQYYDNVKTNLTTHCESRLRKFFKMRAFELNDYAIKYNYFNNLYGMIEFELPYYDEEDIKNAINYTYRRRNTAIGDVEREMRLGELLDELRWLGAPDDCNIRDFVKEDWFKSIRMWSEIQRDIRNFHFAYEDRRDKPQIKNFVVVPMCTFQRRHIRIDTDALYVILSNAKLVPRKCGKRTRKDGTTNFKNITSNEFHTNKILSWNLFFDVEKILKLVHNKKEFDSQICSDGVSVSLLYKKPKVPPVETTDDEIKAMYDSNELKYAVGCDPGMRTWNASVRRDLHTKEEVNLRISSKRYHWDAKQGRRNAKAERITRLFTFEEQADRNRIAAMIGEMPSPKGPSWRSYIEHRLRVMNDGIETYSTKQYARLGLDKHIESVRAIDKTACKMVHNQPSIFYMGASGSTPANSPIKIKKHVRCPGTRKLIAAIMKRGNCIVWMVDENVWVVYQIQLLDYHEPS

SEQ ID NO: 3422 - protein, 440 aa, Contarinia nasturtii
MCDFRRTHFKIDCSSMYQILSSQKLIPKQLTEDGKPSDKNISQKVFNENKDYIWNQYFYMRKIRWFVRRKKKFDFSINSDGIAVSLQYSTKKKETSNTQSGTSRLDIIDMLKAGKFKRLGGTDSGMRNWNTTTIHEIDTCKEINFVKKSKQFHWETHQNVRNAKAKRFTKNFIEKERQDRENRELYAMMPSPKGSQWLSYIKHRVKMTKHGIEAYSTAKYTRLALDKYIGSNKVIDGFVNKITNKEPTLLFHGADGEVPPDCPIRIKKHVRCPGVRKLMQAYKKRPYIVVVPVDEWGTSQTDARCMCRFQNQPKSAKFKMCRCIPNAITLLPTKIVSKFGKTDTSTYRQLQRTLNGAFEIEEELMSRVKPYYKKWQLDLECTVTWHRDVVAAKNILLKGLWTLLGLPIPAAINRYWNQINADAAVFDDDNDVDISEPEFE

SEQ ID NO: 3423 - protein, 648 aa, Contarinia nasturtii
MVERNSEEQFRWPDDEKLGNGLRYFYKQYITNIQTNTNTWCEKRLENFFRMRCWYRNRFNNGSRFDNIDIRNAKEFSYRFKNLTNGNNVDPQRVEKFNILMRDLTEIGWSGTVSMKFFAKYRWFESLWLFGQMQRQIEVYHSHAEQWYTIHEMFRNNPNFQEPTINRPPKISSFALIPLCDYHLKNVRLDIKDLYYKIVNELDLVPSFLNTQTNRMNKRNLKYYTQTDRSGLWNMLFDVGKINKLGKSKPFHHQILTDSVSISIMYKKPQRQQRPQRQQRPQQTTQANRGPEKLIGKKYIIGIDPNEKSWLTVVRRNIQKTPDEPAVEENIIIPNQRFHWETQQKKRDKEAKKLAGWFDIEEKEHLKTYPYRPPSPRNSTWKSYIEYRIKMLRKGMAAYATREYARLDLDHHIRSTRVNDQIAVRVTNNKPSLVQFGAWAMKPDRPFGIKKRKRCPGSRKFRVSIKKLGHSEVEMQDEWGTSQTCANCQERFPRHTKDDRFKVCYDCRAKKIDGLPDSVAGLPDIIVSTVNRRVLRRKRAIIKRQIIDGNREAVNEKIRTGRLMSKVKVTYKNWPLNVDDDDVVPQTVTWHRDIVAAKCIMLKGMNQLETEYSLFNVFALNYIGLCRIFDVPLPVSLLRPPDYNNNVN

SEQ ID NO: 3424 - protein, 741 aa, Contarinia nasturtii
MGRHKAADPNADQRCIKQGLPSIIRERYRDVIIAIISILSIKATKIACLASLLFLMKVNEAVDHFDDEFFVWDDGSSMIKRCFKAVLRDNIGKVFLMLPDFRQLVDAARIDWPTNGGFGNSFKYLYEQYEDNVRTNLKTHCESRLRKFFKLKTFQLNDNAIRYNYFNNLYGSPNELPYYDETDIKNAVNYAYHRKDNTSDDVERQLRLGELLDELRWLGAPEDCNIKEYVSENWFHSIRMWIHIQREIQWYHNEYKCRRDAPQIKNFVVVPMCSFQRRHIRIDTDALYTILASVKLVPLKCGLKKRKDKTTNSINITSNEFRRNKILSWNLFFNVEKVQQLVHFKKYFDFQICSDGVSVSMMYKKPKLPPLEISDAEIMKMYKGNKLKYAIGCDPGMKTWNASVRRDLDTKEEVNLRISSKRYHWDAKQGRRNAKAERITRLFTYDEKADRNRVAATLGTMPSPRETSWRSYIEHRLRVMNDGIETYTCKQYARLGLDKHIDSVRAIDKTACKLTRNQPSIFYMGASGSTPANSPIKIKKHVRCPGTRKLIAAIMKRGNCIVRMVDEYMTSQHCPLCFKRFPQETRRDRYKKCVGCVPNPIVGLPRTIVTNVSKRLLQMRRTIERMWREMRDIGDVIAATLRDGPNAGRLVSKKQRFFKTWLPNVANVEIEGAAGAQPTLTTVWHRDIAAAKLILYKGECVVFKRTIHPNVRRPRRVDNNQPLPLYRGQNQNVNNGHLQPQ

SEQ ID NO: 3425 - protein, 723 aa, Contarinia nasturtii
MSRTRSREDQFNIPPERKDDIKNLVVIKQGVKSIIREEYRDRVIQFLDHRSYKMTLISSLASLLALYKIQEAIDDGNQQFFVQNGKTFFIECFNGVLADKVDREELMPPAFRNIVEAHFGVENFEWPDKECLGNGFNYFYQDHIRNNQTNLNTHCSVHVESFFQMKRWYYNMHINGHQYNGSKFDGIDIRNAKVYATSNKDLTHGDVERTNKMNILLYELERIGWQCQKVHNEQLVPVTVNEFVKDNWFQSLWMFGQMQRQIEVFHQYSQQWHAFRRDGLITNNRPPKVNNFALVPLCRFQLKNVRLDMTDMYYLANTVLGVVPSSRNPLTNRMNKYTLDYYLYGHRDELWNLVFDMDKIKQIGKQKRFHSQIITNSVCVSILYEKPAKAWVENSEQATFNNMTYASAIDPNEKTWVAVVRRHIKSNIEENIKISNPRFHWQTEQKKRDRKADRLTWWFVEEEQMDFKSYPVIPSPRGSTWKAYILHRIKMLRMGMQAYATRKYARLDLDHHIKATKTSDKVAMRVTNNKPSWIWIGAGEMAPNRPWGIKKRKRCPGTRKLATSFKKQEHTKVSFQDEWGTSITCANCHERFPRETKNHRFKICRNCIPKPIVGLPPIIVTNLSRQELKKERIVERAINPDRENIERLVPKIKVIFKTWSLTREYHELGDAAPEDMIEHVVIWHRDIVAAKNILFKGMCRLFGIPLPDSLKRPDNPHHANNVN

SEQ ID NO: 3426 - protein, 741 aa, Contarinia nasturtii
MGRHKAADPNADQRCIKQGLPSIIRERYRDVIIAIISILSIKATKIACLASLLFLMKVNEAVDHFDDEFFVWDDGSSMIQRCFKAVLRDNIGKVFLMLPDFRQLVDAARIDWPTNGGFGNSFKYLYEQYEDNVRTNLKTHCESRLRKFFKLKTFQLNDNAIRYNYFNNLYGSPNELPYYDETDIKNAVNYAYHRKDNTNDDVERQLRLGELLDELRWLGAPEDCNIKEYISENWFHSIRMWIHIQREIQWYHNEYKCRRDAPQIKNFVVVPMCSFQRRHIRIDTDALYTILASVKLVPLKCGLKKRKDKTTNSINITSNEFRRNKILSWNLFFNVEKIQQLVHFKKYFDFQICSDGVSVSMMYKKPKLPPVEISDAEIMKMYKGNKLKYAIGCDPGMKTWNASVRRDLDTKEEVNLRISSKRYHWDAKQGRRNAKAERITRLFTYDEKADRNRVAATLGTMPSPRETSWRSYIEHRLRVMNDGIETYTCKQYARLGLDKHIESVRAIDKTACKLTRNQAAIFYMGASGSTPANSPIKIKKHVRCPGTRKLIAAIMKRGNCIIRMVDEYMTSQHCPLCFKRFPQETRRDRYKKCVGCVPNPIVGLPRTIVTNVSKRLLQMRRTIERMWREMRDIGDVIAATLRDGPNAGRLVSKKQRFFKTWLPNVANVEIEGAAGAQPTLTTVWHRDIAAAKLILYKGECVVFKRTIHPNVRRPRRVDNNQPLPLYRGQNQNVNNGHLQPQ

SEQ ID NO: 3427 - protein, 716 aa, Contarinia nasturtii
MNVGINNGDFSFFANSGEEKINTCFSQVLAKHNPKNPKPKKTPKPKPKPEPKPEPEQPSKTKRKPRGPAKEIPPIDPEFKAIVEGLDEVHRFDWPSNKDFGNGLKHLCNQYIDNNVTNSQTHSDKHITQYLKMKVFQMNTNEAIEEKYLPSDIDCVVKLILKEKVIKVPASDPNKLYRCGVLYDIVNKLNVFPEIDLHDLTTNSKNWFKAVPMYLSMQREIEEFNLLRAHQEPPKKRKKRKRRRPKGKKRKWIIKRKQMLDDLEYLPCIRNLVVVPMCDFRRTHFKIDSSSMYQILSSQKLIPKQLTEDGKPSGRNISEKVYNENKDYIWNQYFYMRKIRWFVRRKKKFDFSINSDGIAVSLQYSTKKKETSNTQSGTSRLDIIDMLKAGKFKRLGGTDSGMRNWNTTTIHEIDTCKEINFVKKSKQFHWETHQNVRNAKAKRFTKNFIEKERQDRENRELYAMMPSPKGSQWLSYIKHRVKMTKHGIEAYSTAKYTRLALDKYIRSNKAIDGFVNKITNKEPTLLFHGADGEVPPDCPIRIKKHVRCPGVRKLMQAYKKRPYIVVVPMDEWGTSQTDARCMCRFQNQPKSAKFKMCRCIPNAITLLPTKIVSKFGKTDTSTYRQLQRTLNGAFEIEEELMSRVKPYYKKWQLDLECTVTWHRDVVAAKNILLEGLWTLLGLPIPAAINRYWNQINADAAVFDDDNDVDISEPEFE

SEQ ID NO: 3428 - protein, 626 aa, Contarinia nasturtii
MGWDDGSSMIKRCFKAVLRDNIGKVFLMLPDFRQLVDAARIDWPTNGGFGNSFKYLYEQYEDNVRTNLKTHCESRLRKFFKLKTFQLNDNAIRYNYFNNLYGSPNELPYYDETDIKNAVNYAYHRKDNMNDDVERQLRLGELLDELRWLGAPEDCNIKAYVSENWFHSIRMWIHIQREIQWYHNEYKCRRDAPQIKNFVVVPMCSFQRRHIRIDTDALYTILASVKLVPLKCGLKKRKDKTTNSINITSNEFRRNKILSWNLFFNVEKIQQLVHFKKYFDFQICSDGVSVSVMYKKPKLPPLEISDAEIMKMYKGNKLKYAIGCDPGMKTWNASVRRDLDTKEEVNLRISSKRYHWDAKQGRRDAKAERITRLFKQYARLGLDKHIDSVRAIDKTACKLTRNQPSIFYMGASGSTPANSPIKIKKHVRCPGTRKLIAAIMKRGNCIIRMVDEYMTSQHCPLCFKRFPQETRRDRYKKCVGCVPNPIVGLPRTIVTNVSKRLLQMRRTIERMWREMRDIGDVIAATLRDGPNAGRLVSKKQRFFKTWLPNVANVEIEGAAGAQPTLTTVWHRDIAAAKLILYKGECVVFKRTIHPNVRRPRRVDNNQPLPLYRGQNQNVNSVHLQPL

SEQ ID NO: 3429 - protein, 427 aa, Contarinia nasturtii
MNKRNLKYYTQTDRSGLWNMLFDVGKINKLGKSKPFHHQILTDSVSISIMYKKPQRQQRPQQTTQANRGPEKLIGKKYIIGIDPNEKSWLTVVRRNIQKTPDEPAVEENIIIPNQRFHWETQQKKRDKEAKKLAGWFDIEEKEHLKTYPYRPPSPRNSTWKSYIEYRIKMLRKGMAAYATREYARLDLDHHIRSTRVNDQIAVRVTNNKPSLVQFGAWAMKPDRPFGIKKRKRCPGSRKFRVSIKKLGHSEVEMQDEWGTSQTCANCQERFPRHTKDDRFKVCYDCRAKKIDGLPDSVAGLPDIIVSTVNRRVLRRKRAIIKRQIIDGNREAVNEKIRTGRLISKVKVTYKNWPLNVDDDDVVPQTVTWHRDIVAAKCIMLKGMNQLETEYSLFNVFALNYIGLCRIFDVPLPVSLLRPPDYNNNVN

SEQ ID NO: 3430 - protein, 778 aa, Contarinia nasturtii
MCIRESSFSILNITSVVSINQFNMSTTGETSAAQAKKKRYKYQTKKQQEEEAEDENFNDNGLLAIKMRLTTIVRPEYHDVVIHWIEKKSVMSTKISVLASLLFLDKVKSAQNNLQWDFFTNRMYVNQKGKLVEKNRAEDVIERCFYAVLQKNKENEDMEPHIRHFVEQGLSRDNQFAWPNNNYFGNIMKSLCQSYTRQLKTNQTTHAKKRLRNYLQMRAWQFNAVSTGLRFDKKDVDNAIDWAIRRYDAIRDTHQNAPLKRYKRKLLLDMVRAIVEEVGGLANYDNIKQFSKGKYWFKATAMWLVMQSEIDEFHNWAQDNNVTIPKIKNLSVVPLPDYQRKAVFMCNDVFYRMLAEEKLLPKVEGKQVTETFIRENKEHFWNQIFDFDKINRILKKNKEFHYTIVSNGESVSVLYKLSKQHLQRLLDDDIVRKRYLDGTFVYELGIDPGMKTWNATVRRTISTRKEVNLKTSSKKYHWLTKYKIRDKKAKRWTKQFTLDEQNDRNNRQLYQRMPSPLGTLWTDYVCHRIKMLKKGMDVYTTPKYARLKFDKYVESNSTIDKLCGTLVNHQAALIHLGNADMSPNSPIRIKKHVRCPGTRKLLKGFRKRGNCVVRKVDEYFTSQTCAKCGGRFDPNTKSNRFKVCENCAPVPNSIMANFLPSKIVAQLSKRRLKYNKVYIEESLAVFLARGEMTEHDFDIIADRLLSKVAVYPKKWQVNAVSGVLEYADVKVDQQLHAVDDENAAEIDGEVAQKPCAVDDECVTEIDDKQQPMIVHQTT

SEQ ID NO: 3431 - protein, 592 aa, Contarinia nasturtii
MGRRAKINSAFKKNTAKLNDNEELRSIKLSAPSVFKSEYSEALTEHFFHKCYNGTVICYLGSTLFLYVVNLAADNDDRQYFIDSDGKNVIRECFAAVSRENSENPKQPKIPRGFLEMIADDQFEWPNNILESFLQMIRYQLNEDPNRLIKFDGIDIRNAKNNLMFNQDCTGGDQHRTNKMNELYEQVAVRCLPSFREYLSMIEYIEKKWFESLWFFIFIQREISIFLEEHHDLVQLWLRHQRHPLFYCKPSKPLPPKIRNFTVIPICDSKLKHIKFDQDDLMSLLAQWKVVPKIFNNDHGGHNMYSRNYYKENEDEAWAILFNMDKINEIKKPNQQFHHMIVCDSVSASVLYRTPKPEIENTELHRQRIKQKLENNEYKYIVAIDPGMKTYLAGIRRNIEDRTEENFKISSKSYHWGAGQKVRDKMGKRMTARFTQREQLDRESYPSIPSPRGIRWRNYVRHRLTMVKDAVAAYARRRYARLSFDKYIGSQGEKDWLAKVITKNEPSLINIGAVDMAPNSPIGIKKGKRCPGTRHLQCSVKKLGHSDVHKVNEDFTSQHCANCQKKFPIQTQKYRFKVCRNCTRDAPMHHKK

SEQ ID NO: 3432 - protein, 415 aa, Contarinia nasturtii
MTDMYYLANTVLGVVPSSRNPLTNRMNKYTLDYYLYGHRDELWNLVFDMDKIKQIGKQKRFHSQIITNSVCVSILYEKPAKAWVENSEQATFNNMTYASAIDPNEKTWVAVVRRHIKSNIEENIKISNPRFHWQTEQKKRDRKADRLTWWFVEEEQMDFKSYPVIPSPRGSTWKAYILHRIKMQRMGMQAYATRKYARLDLDHHIKATKTSDKVAMRVTNNKPSWIWIGAGEMAPNRPWGIKKRKRCPGTRKLATSFKKQEHTKVSFQDEWGTSITCANCHERFPRETKNHRFKICRNCIPKSIVGLPPIIVTNLSRQELKKERIVERAINPDRENIERLVPKIKVIFKTWSLTREYHELDDAAPEDMIEHVVIWHRDIVAAKNILFKGMCRLFGIPLPDSLKRPDNPHHANNVN

SEQ ID NO: 3433 - protein, 757 aa, Contarinia nasturtii
MDDDEFDDNQPEESKYVVIKCGLQTILRQQHERIERVGEAVTKMLFERSVQMTEVAALASLFILFILNEALDNDDRAFFLKPHPSLFIADCFRAVLNQHVNNINSRYRILPEFRFMVERNSEEQFRWPDDEKLGNGLRYFYKQYITNIQTNTNTWCEKRLENFFRMRCWYRNRFNNGSRFDNIDIRNAKEFSYRFKNLTNGNNVDPQRVEKFNILMRDLTEIGWSGTVSMKFFAKYRWFESLWLFGQMQRQIEVYHSHAEQWNTIHEMFRNNPNFQEPTINRPPKISSFALIPLCDYHLKNVRLDIKDLYYKIVNELDLVPSFLNTRTNRMNKRNLKYYTQTDRSGLWNMLFDVGKINKLGKSKPFHHQILTDSVSISIMYKKPQRQQRPQQTTQANRGPEKLIGKKYIIGIDPNEKSWLTVVRRNIQKTPDEPAVEENIIIPNQRFHWETQQKKRDKEAKKLAGWFDIEEKEHLKTYPYRPPSPRNSTWKSYIEYRIKMLRKGMAAYATREYARLDLDHYIRSTRVNDQIAVCVTNNKPSLVQFGAWAMKPDRPFGIKKRKRCTGSRKFRVSIKKLGHSEVEMQDEWGTSQTCANCQERFPRHTKDDRFKVCHDCRAKKIDGLPDSVAGLPDIIVSTVNRRVLRRKRAIIKRQIIDGNREAVNEKLRTGRLMSKVKVTYKNWPLNVDDDDVVPQTVTWHRDIVAAKCIMLKGMNQLETEYSLFNVFALNYIGLCRIFDVPLPVSLLRPPDYNNNVN

SEQ ID NO: 3434 - protein, 742 aa, Contarinia nasturtii
MGRHKKADPNADQRCIKQGLPSIIRERYRDVIVAIISYLSVKATKIACLASLLFLMKVNEALDDFNYDFFETDEPSTIIHNCFKAVLVDNIGNISLMLPGFRNIVDAAHIDWPTNGGFGNGFKYIWEQYYDNVKTNLTTHCESRLRKFFKMRAFELNDYAIKYNYFNNLYGMIEFELPYYDEEDIKNAINYTYRRRNTAIGDVEREMRLGELLDELRWLGAPDDCNIRDFVKEDWFKSIRMWSEIQRDIRNFHFAYEDRRDKPQIKNFVVVPMCTFQRRHIRIDTDALYVILSNAKLVPRKCGKRTRKDGTTNFKNITSNEFRTNKILSWNLFFDVEKILKLVHNKKEFDSQICSDGVSVSLMYKKPKVPPVETTDDEIKAMYDSNELKYAVGCDPGMRTWNASVRRDLHTKEEVNLRISSKRYHWDAKQGRRNAKAERITRLFTFEEQADRNRIAAMIGEMPSPKGPSWRSYIEHRLRVMNDGIETYSTKQYARLGLDKHIESVRAIDKTACKMVHNQPSIFYMGASGSTPANSPIKIKKHVRCPGTRKLLAAIMKRGNCIIRMVDEYMTSQHCPLCFKRFPQETRRDRYKTCVGCVPNPIVGLPRTIVTNVSKRLLQMRRTIERMWREMRDIGDVIAATLRDGPNAGRLVSKKQRFFKTWLPNVANVEIEGAAGAQPTLTTVWHRDIAAAKLILYKGECVVFKRTIHPNVRRPRRVDNNQPLPLYRGQNQNVNNGHLQPQ

SEQ ID NO: 3435 - protein, 763 aa, Contarinia nasturtii
MDDDELDDNQPEESKYVVIKCGLQTILRQQHERIERVGEVVTKMLFERSVQMTEVAALASLSILFILNEALDNDDRAFFLKPHPSLFIADCFRAVLNQHVNNIRSQYRILPEFRFMVERNSEEQFRWPDDEKLGNGLRYFYKQYITNIQTNTNTWCEKRLENFFRMRCWYRNRFHNGSRFDNIDIRNAKEFSYRFKNLTNGNNVDPQRVEKFNILMRDLTEIGWSGTVSMKFFAKYRWFESLWLFGQMQRQIEVYHSHAEQWYTIHEMFRNNPNFQEPTINRPPKISSFALIPLCDYHLKNVRLDITDLYNKIVNELDLVPSFLNTQTNRMNKRNLKYYTQTDRSGLWNMLFDVGKINKLGKSKPFHHQILTDSVSISIMYKKPQRQQRPQRQQRPQQTTQANRGPEKLIGKKYIIGIDPNEKSWLTVVRRNIQKTPDEPAVEENIIIPNQRFHWETQQKKRDKEAKKLAGWFDIEEKEHLKTYPYRPPSPRNSTWKSYIEYRIKMLRKGMAAYATREYARLDLDHHIRSTRVNDQIAVRVTNNKPSLVQFGAWAMKPDRPFGIKKRKRCPGSRKFRVSIKKLGHSEVEMQDEWGTSQTCANCQERFPRHTKDDRFKVCYDCRAKKIDGLPDSVAGLPDIIVSTVNRRVLRRKRAIIKRQIIDGNREAVNEKIRTGRLMSKVKVTYKNWPLNVDDDDVVPQTVTWHRDIVAAKCIMLKGMNQLETEYSLFNVFALNYIGLCRIFDVPLPVSLLRPPDQNNNVN

SEQ ID NO: 3436 - protein, 250 aa, Contarinia nasturtii
MINSSRRNKWPEDHKSYADHILRHFEEKFTAYTQYEYALQAFLQYIDTNRALDAYATKLIDGKQTFIFVGDRFIAADSPARGYIRSKVRDLFEKLKRRRKCTVVEVDEFRTTKLCSLCFRELEKPTKRGKVKEKYRYLTCHGCEPLCGENVLGKAQGPIESRKSNRKLTQQRKHRPRTDGPRMASKFRKYEEKTRIGRTITWNRDANAGRNILYKGWCAVMNIELHPAFQRHVEEEEENAGGGDPPQSLK

SEQ ID NO: 3437 - protein, 545 aa, Contarinia nasturtii
MVNDLNVFPEIDLHDLTTDEKHWFKAMPMFLSMQREIEEYNLEWPYQHRSKRKKRKRKKSKRRPKRKQMLDDPNFRPFIRNLVVVPMCDFRRKHYKIDCSSMHQVLSSQELLPKVEVENKNGTTSMVILPQKDFNAARDHWWNQYFYMRKIRRFVRGKKKFDFSINTDGIAVSLQYSAKKKTNNTEYDRSRIVEMILDGKFENFAGVDTGLKSWNTTVTHNIITGTETNFVMSSKQFHWKTGQNVRNAKAKRWTKKFTEEERRDRENRELYPVMPSPKGSHWLDYIKHRIKMMKHGICAYSTAKYTRLALDKHIKSSSVVDNWVEKVTDKQPTLFLFGADGEVPPDSRISIKKHVRCPGVRLTLRSIKKRRDCAIELVDEWGSSQTDARCMKRFQNQPKSARFKKCRCIPDARTLLPIKIVSKLGKKDLSEFRLLQRAMNEALEENEPLLSKVKSYYKNWQLNLECSVTWHRDVVAAKNILLKGLWTLLGLPIPDAINRYKARDAVAEAAEVAADVAEAAAAAAANVDNDVEMFEYDQQPADHAV

SEQ ID NO: 3438 - protein, 773 aa, Contarinia nasturtii
MRRKRAKNGRSTSLKMTLNQVLREEYRAPFIDQVTYWCLSATMIMTLASLLFLFKANKAFDDENVRFFKGESDEYTNDEFNKYVNGVIGECFTSVLQENYHKLPLAFRRTVEQACPDFLRPENWPAREGMGNAFNHLITQYITNVKNNIKVWAFSRIKKFFTLKRYELNLNRQGNLITELDVKRATKIVMFQSRVERNANIDLLLNEAAGIGLPINVHFQNLIRDRWFQTIPIFINIQRQIFDFHAKYEMLKQRWFQYRRDPNKNVMPTTPLPPKIKNFLVVPIHDFDMKHIRIDIHLFYLIARKFGALKLAKGKRGQPINIEKTEYDSNPAFYWNLIFDMPKISKLGNGKEFDFAVATDSVAVSLCFVKPERNTPELDNNTIKEKYNNFEFDYVLGIDPGVRTWNATVRKHVRSGNEENITIDGPKYHFKAKYGKRKRKSDQWTELLQKQRELDYKRYAFFPSPKGRSHWMCYIAYYVKMMKPAMAVYTTRKFIRLRLDKYIEENRASDKIAASLTKKKSALVFIGAAQIAPNSPIGIKKRLRCPGLRRLLNSFKKLGNCIVRLVDEYNTSQTCAKCFRPFDRRTKSDRYKVCQHCIPSEDESSQWNLPNVIITMKSNRVYQQLRKYAVDFVNRLNAANPDHIPMDSDGLVSKLQVCFKNWQLNTGIWKDDRAPFQLKTVWHRDIVAAKNIMYKGEKISLKLKMFKNVLANNLLFTILFLGLCTVLGLDIHPQLLRPQNQNAAVQNQAADDEDSSDDEDYVYVLDVSDDDQF

SEQ ID NO: 3439 - protein, 772 aa, Contarinia nasturtii
MDDDELDDNQPEESKYVVIKCGLQTILRQQHERIERVGEVVTKMLFERSVQMTEVAALASLSILFILNEALDNDDRAFFLQPHPRLFIADCFRAVLNQHVNNINSQYRILPEFRFMVERNSEEQFRWPDDEKLGNGLRYFYKQYITNIQTNTNTWCEKRLENFFRMRCWYRNRFNNGSRFDSIDIRNAKEFSYRFKNLTNGNNGNNVDPQRVEKFNILMRDLTEIGWSGTVSMKFFAKYRWFESLWLFGQMQRQIEVYHSHAEQWNTIHEMFRNNPNFQEPTINRPPKISSFALIPLCDYHLKNVRLDIKDLYNKIVNELDLVPSFLNTRTNRMNKRNLKYYTQTDRSGLWNMLFDVGKINKLGKSKSFHHQILTDSVSISIMYKKPQRQQRPQRQQRPQRQQRPQQTTQANRGPEKLIGKKYIIGIDPNEKSWLSVVRRNIQKTPDEPAVEENIIIPNQRFHWETQQKKRDKEAKKLAGWFDIEEKEHLKTYPYRPPSPRNSTWKSYIEYRIKMLRKGMAAYATREYARLDLDHHIRSTRVNDQIAVCVTNNKPSLVQFGAWAMKPDRPFGIKKRKRCPGSRKFRVSIKKLGHSEVEMQDEWGTSQTCANCQERFLRHTKDDRFKVCYDCRAKKIDGLPDSVAGLPDIIVSTVNRRVLRRKRAIIKRQIIDGNREAVNEKLRTGRLMSKVKVTYKNWPLNVDDDDVVPQTVTWHRDIVAAKCIMLKGMNQLETEYSLFNVFALNYIGLCRIFDVPLPVSLLRPPDQNNNVN

SEQ ID NO: 3440 - protein, 762 aa, Contarinia nasturtii
MKKRRAKINSAFKKNTAKLNDNEELRSIKLSAPSVFKSEYSEALTEHFFHKCYDGTVICYPGSTLFFYVVNIAADNDDRQYFIDSVGKNVIRECFAAVSRENLENPNQPKIPRGFLEMIADDQFEWPSRYQMGNAFEYLNQQYLSNVTTNLTTHLDNILENFLQMIRYQLNEDPNRLIKFDGIDIRNAKNNLMFNQDCTGVDQHRMNKMNELYEQVAVRCLPSFRNHLSMIEYIEKKWFESLWFFIFIQREISIFLEEHHDLVQLWLRHQRHPLFYCKPSKPLPPKIRNFTVIPICDSQLKHIKFDQVDLMSLLAQWKVVPKIFNNDDGGHNMYSRNYYKENEDEAWAILFNMDKINEIKKPNQQFHHMIVCDSVSASVLYRTPKPEIENTELHRQRIKQKLENNEYKYIVAIDPGMKTYLAGIRRNIEDRTEENFKISSKSYHWGAGQKVRDKMGKLMTARFTQREQLDRESYPSIPSPRGIRWRNYVRHRLTMVKDARRRYSRLSFDKYIGSQGEKDWLAKVITKNEPSLINIGAVDMAPNSPIGIKKGKRCPGTRHLQCSVKKLGHSDVHKVNKDFTSQHCANCQKKSPIQTQKYRFKVCHCTRDAPIPQEIEPYISLPRLIVTKKSQRRKKKDSCVKKLIARGIMDPANQPAEFQPGRLESKKMYFLINWLLNSVNAIQMGGDADKYPEQQQQHQKRFCTVWHRDIVAARCIMYKGLCYIFNLEMHNSYVRAPAPPRPPLRRRQPARRRANANVVPDQ

SEQ ID NO: 3441 - protein, 491 aa, Contarinia nasturtii
MTTADNWFKYVPIFLHLQRYICDHQRNREAALRRGERTEPRDYRNFTVFPVSTFKRHHIRIDNKGLYFMLREIGCPNPRLIRRDGTTKQCKELKAADWDVLWRTYFDIDAIERTTQNDNCATIKFRNSIQTDGVAMSFWMERTKFVVVKDENEIMRETQEKLLKAQLVYGLDPGLQLVIGGVCVTNYNDPNKENRREKLVRLTSGQYNHMIGYCKRNKWRKKLTFNIDEKMRIHRESFDEQPGPHSDNIDRYVDHILRHFNEKFEAYTQYEYALQDFLQYIDTNKTLDKLADWLIDGKETFVFVGENFIAADSEAKGYIRSKVRDLFEKMKRRRNCIVVKVDEFRTTKVCSYCFKDLEFPKIGDRVKMKYRYSTCRGCEPLPVGNKPHGPIDSRKSNHLLTKQRKHRPHPGPRMASKFRRYEEKRTIGRTITWNRDTNAGRNILYKDIGRCAVMNEELHPVFQRPTAPIQNQQPIQGTSRSIQDQVRNSRP

SEQ ID NO: 3442 - protein, 637 aa, Contarinia nasturtii
MVERNSEEQFRWPDDEKLGNGLRYFYKQYITNIQTNTNTWCEKRLENFFRMRCWYRNRFHNGSRFDNIDIRNAKEFSYRFKNLTNGNNGNNVDPQRVEKFNILMRDLTEIGWSGTVSMKFFAKYRWFESLWLFGQMQRQIEVYHSHAEQWHTIHEMFRNNPNFQEPTINRPPKISSFALIPLCDYHLKNVRLDIKDLYNKIVNELDLVPSFLNTRTNRMNKRNLKYYTQTDRSGLWNMLFDVGKINKLGKSKSFHHQILTDSVSISIMYKKPQRQQRPQRQQRPQRQQRPQQTTQANRGPEKLIGKKYIIGIDPNEKSWLSVVRRNIQKTPDEPAVEENIIIPNQRFHWETQQKKRDKEAKKLAGWFDIEEKEHLKTYPYRPPSPRNSTWKSYIEYRIKMLRKGMAAYATREYARLDLDHHIRSTGVNDQIAVRVTNKKPSLIQFGAWAMKPDRPFGIKKRKRCPGSRKFCVSIKKLGHSEVEMQDEWGTSQTCANCQERFPRHTKDDRFKVCYDCRAKKIDGLPDSVAGLPDIIVSTVNRHVLRRKRAIIKRQIIDGNREAVNEKLRTGRLMSKVKVTYKNWPLNVDDDDVVPQTVTWHRDIVAAKCIMLKGLCRIFDVPLPVSLLRPPNQNNNGN

SEQ ID NO: 3443 - protein, 639 aa, Contarinia nasturtii
MVERNSEEQFRWPDDEKLGNGLRYFYKQYITNIQTNTNTWCEKRLENFFRMRCWYRNRFNNGSRFDSIDIRNAKEFSYRFKNLTNGNNGNNVYPQRVEKFNILMRDLTEIGWSGTVSMKFFAKYRWFESLWLFGQMQRQIEVYHSHAEQWHTIHEMFRNNPNFQEPTINRPPKISSFALIPLCDYHLKNVRLDITDLYNKIVNKLDLVPSFLNTRTNRMNKRKVKYYTQIDRSGLWNMLFDVGKIYKLGKSKPFHHQILTDSVSISIMYKKPQRQQRPQQTTQANRGPEKLIGKKYIIGIDPNEKSWLTVVRRNIQKTPDEPAVEENIIIPNQRFHWETQQKKRDKEAKKLAGWFDIEEKEHLKTYPYRPPSPRNSTWKSYIEYRIKMLRKGMAAYATREYARLDLDHHIRSTRVNDQIAVRVTNNKPSLVQFGAWAMKPDRPFGIKKRKRCPGSRKFRVSIKKLGHSEVEMQDEWGTSQTCANCQERFPRHTKDDRFKVCYDCRAKKIDGLPDLVAGLPDIIVSTVNRRVLRRKRAIIKRQIIDGNREAVNEKIRTGRLMSKVKVTYKNWPLNVDDDDVVPQTVTWHRDIVAAKCIMLKGMNQLETEYSLFNVFALNYIGLCRIFDVPLPVSLLRPPD

SEQ ID NO: 3444 - protein, 711 aa, Contarinia nasturtii
MKRRRAKINSAFKKNTAKLNDNEELRSIKLSAPSVFKSEYSEALTEHFFHKCYNGTVICYLGSTLFLYVVNLAADNDDRQYFIDSDGKNVIRECFAAVSRENLENPKQPKIPRGFLEMIADDQFEWPSRYQMGNAFEYLNQQYLSNVTTNLTTHLDNILENFLQMIRYKLNEDPNRLIKFDGIDIRNAKNNLMFNQDCTGGDQHRTNKMNELYEQVAVRCLPSFRERLSMIEYIEKKWFESLWFFIFIQREISIFLEEHHDLVQLWLRHQRHPLFYCKPSKPLPPKIRNFTVIPICDSKLKHIKFDQDDLMSLLAQWKVVPKIFNNDHGGHNMYSRNYYKENEDEAWAILFNMDKINEIKKPNQQFHHMIVCDSVSASVLYRTPKPEIENTELHRQRIKQKLENNEYKYIVAIDPGMKTYLAGIRRNIEDRTEENFKISSKSYHWGAGQKVRDKMGKRMTARFTQREQLDRESYPSIPSPRGIRWRNYVRHRLTMVKDAVAAYARRRYARLSFDKYIGSQGEKDWLAKVITKNEPSLINIGAVDMAPNSPIGIKKGKRCPGTRHLQCSVKKLGHSDVHKVNEDFTSQHCANCQKKFPIQTQKYRFKVCRNCTRDAPIPQEIEPYISLPRLIVTKKSQRRKKKDSCVKKLIARGIMDPANQPAEFQPGRLESKKMYFLKNWLLNPVNAIQMGGDADKYPEQQQQQQHQKRFD

SEQ ID NO: 3445 - protein, 519 aa, Contarinia nasturtii
MFNQDCTGGDQHRTNKMNELYEQVAVRCLPSFRERLSMIEYIEKKWFESLWFFIFIQREISIFLEEHHDLVQLWLRHQRHPLFYCKPSKPLPPKIRNFTVIPICDSKLKHIKFDQDDLMSLLAQWKVVPKIFNNDHGGHNMYSRNYYKENEDEAWAILFNMDKINEIKKPNQQFHHMIVCDSVSASVLYRTPKPEIENTELHRQRIKQKLENNEYKYIVAIDPGMKTYLAGIRRNIEDRTEENFKISSKSYHWGAGQKVRDKMGKRMTARFTQREQLDRESYPSIPSPRGIRWRNYVRHRLTMVKDAVAAYARRRYARLSFDKYIGLQGEKDWLAKVITKNEPSLINIGAVDMAPNSPIGIKKGKRCPGTRHLQCSVKKLGHSDVHKVNEDFTSQHCANCQKKFPIQTQKYRFKVCRNCTRDAPIPQEIEPYISLPRLIVTKKSQRRKKKDSCVKKLIARGIMDPANQPAEFQPGRLESKKMYFLKNWLLNPVNAIQMGGDADKYPEQQQQQQHQKRFD

SEQ ID NO: 3446 - protein, 1288 aa, Bradysia coprophila
MKNTKELSDSDTDIEKRQRKWQHQRQQKGNKKPKKRGQSNGNGNGKDSDDDFVSTKKVYNSPPKLPNVAAVGRRKNVIPKKPPVSSNVNVNVLDSPPKLPNVAAAPKKPPVSSAAINAALLNATTKDRSSSPSNATAASNPAINITSHRNTTSSIIGSGRTGSTQEVAHPLPIRQSPPPMEYGSEWDTDGEATIAQLKQMQRKRPSKKAHSTSTKPEVKQTPVQSNRKRAASTDEASDAVEATTKRSTSTKRSKASKRSKATKTQQDSADEAGDADEETTKRSTSTKRSKASKRSKVTKTQQDSADEAGDADEATTKRSTSTKRSKASKAQQRKDDDENGNRAVIQTQLEEIIFLGNVFDKSIRRFTCPFATCNVNYSTFLNLKNHVKKTHEETLQKPIETDTNNWRRIQNANNRFDITTVKQKLRPLIIDGETIIKKQRVLEPLATEKTEVATKVFDIMNKQAVELSKLAILFSSLVYFDVYNTISDPENGNEIDRIFEEEFNWKEMILEFKQFQRNTAKAKKPRPDKHNTFFDLCRKYDVETYFTETSQNAWNSIVDTFATNFKTNITTHLYSRIRKWLAFKLRDGKKKKDVCGKENRKDINNKIYHTIKFLFDSEKCTQAEEVQHELICELQKICQFPNFNHGGRSYFERLRYDFKEDGDDDLGKPKRKRKCAAPKKTTKKSKKKKKKTQNNGPRLNWFQMVPAMVRLQRRIYEINLSRKQTLIDAGIIKEKKKRKRKRKRKRKRKNESKPEPSSTENKRQAGGTKKKREIDPEATHYAKLPNFIVVPQNSFHTMHFPIDTKALFDILKNLPQFMAILNQAEFLELQIDDDPNRKTTNPFWYFLFNIQKMETATKKFGGRITTNGSDVSIQYCKLRKEKELTKAEILEMASNRKRKHDVIDSDSESESEDDDDDDDDNAKTIKTDPAIVSALTNITNMEDLSVSGVDLGVRNVAATVIRKWSKSSDGYEVHESNVLHKSKDYHYKAGFARRQRKGKKLHGEFDERYQKDRQSQPIEPSQRSPDYIKFLDSRLKWFNEGTATYMQRVVTNVKFDKFRSTQKQMMAMAKEIVGDINVHDKATTQPSKIRVVFVGNCSTPANSTIKGHRRSPGNAPIVRYLKQIPQTYVDATIDEYCTTKKCSRCYETLDDVEFSKERLKLCHNCKLAENSTSTNLVSTYQRKKVIAEAMIPITEDYPKPTQFERAQRVAMERTKRWSFGDKMRMAARIKLKSTTYTVNTTATLKHLYWNRDGNAARNIMQLGLCQYNDCLPIEFNKDEAFQRPKKKD

SEQ ID NO: 3447 - protein, 327 aa, Bradysia coprophila
MRTNEETLFRLTSRKFHNMCQQNIRDRKAKRYTSQLETEMAHDREVNFGGTIASPMSATNYMLFIDHRLKHFNSCIALYTQNKYTELAFHKHVHTQKAMDGIVNELLPSSRSHERSLLVIGGTEFNPSAPIKKYRRCPGVRQLVKFVRKRTGCDIVYADEYNTSQVCGRCQRRFKTSDDETIQHKRWERKGARMRLCSNCTPNDNIIPLPTTINTRMSPRAQHLHRLTITNRLFFNVAAYSMEDAKRESDNIHYIAENCCYDMSHDKHTFDPNDRTTQLKCVWNHDISAARNILIKGVASITGIPAPRTLYRQTQINEENSSDESMD

SEQ ID NO: 3448 - protein, 209 aa, Bradysia coprophila
MIIPRCVFRNVAATVIRKWSKSSDGYEVHESNVLHKSKDYHYKAGFARRQRKGKKLHGEFDERYQKDRQSQPIEPSQRSPDYIKFLDSRLKWFNEGTATCMQRVVTNVKFDKFRSTQKQMMAMAKEIVGDINVHDKATTQPSKIRVVFVGNCSTPANSTIKGHRRSPGNAPIVRYLKQIPQTYVDATIDEYCTTKKCSRCYETLDDVVF

SEQ ID NO: 3449 - protein, 1110 aa, Bradysia coprophila
MEYGSEWDTDGEATIAQLKQMQRKRPSKKAHSTSTKPEVKQTPVQSNRKRAASTDEASDAVEATTKRSTSTKRSKASKRSKATKTQQDSADEAGDADEETTKRSTSTKRSKASKRSKVTKTQQDSADEAGDADEATTKRSTSTKRSKASKAQQRKDDDENGNRAVIQTQLEEIIFLGNVFDKSIRRFTCPFATCNVNYSTFLNLKNHVKKTHEETLQKPIETDTNNWRRIQNANNRFDITTVKQKLRPLIIDGETIIKKQRVLEPLATEKTEVATKVFDIMNKQAVELSKLAILFSSLVYFDVYNTISDPENGNEIDRIFEEEFNWKEMILEFKQFQRNTAKAKKSRPDKHNTFFDLCRKYDVETYFTETSQNAWNSIVDTFATNFKTNITTHLYSRIRKWLAFKLRDGKKKKDVCGKENRKDINNKIYHTIKFLFDSEKCTQAEEVQHELICELQKICQFPNFNHGGRSYFERLRYDFKEDGDDDLGKPKRKRKCAAPKKTTKKSKKKKKKTQNNGPRLNWFQMVPAMVRLQRRIYEINLSRKQTLIDAGIIKEKKKRKRKRKRKRKRKNESKPEPSSTENKRQAGGTKKKREIDPEATHYAKLPNFIVVPQNSFHTMHFPIDTKALFDILKNLPQFKAILNQAEFLELQIDDDPNRKTTNPFWYFLFNIQKMETATKKFGGRITTNGSDVSIQYCKLRKEKELTKAEILEMASNRKRKHDVIDSDSESESEDDDDDDDDDNAKTIKTDPAIVSALTNITNMEDLSVSGVDLGVRNVAATVIRKWSKSSDGYEVHESNVLHKSKDYHYKAGFARRQRKGKKLHGEFDERYQKDRQSQPIEPSQRSPDYIKFLDSRLKWFNEGTATYMQRVVTNVKFDKFRSTQKQMMAMAKEIVGDINVHDKATTQPSKIRVVFVGNCSTPANSTIKGHRRSPGNAPIVRYLKQIPQTYVDATIDEYCTTKKCSRCYETLDDVEFSKERLKLCHNCKLAENSTSTNLVSTYQRKQVIAEAMIPITEDYPKPTQFERAQRVAMERTKRWSFGDKMRMAARIKLKSTTYTVNTTATLKHLYWNRDGNAARNIMQLGLCQYNDCLPIEFNKDEAFQRPKKKD

SEQ ID NO: 3450 - protein, 1290 aa, Bradysia coprophila
MKNTKELSSDSDTDIEKRQRKWQHQRQQKGNKKPKKRGQSNGNGNGKDSDDDFVSTKKVYNSPPKLPNVAAVGRRKNVIPKKPPVSSNVNVNVLDSPPKLPNVAAAPKKPPVSSAAINAALLIATTKDRSSSPSNATAASNPAINITSHRNTTSSIIGSGRTGSTQEVAHPLPIRQSPPPMEYGSEWDTDGEATIAQLKQMQRKRPSKKTHSTSTKPEVKQTPVQSNRKRAASTDEASDAVEATTKRSTSTKRSKASKRSKATKTQQDSADEAGDADQETTKRSTSTKRSKASKRSKVTKTQQDSADEAGDADEATTKRSTSTKRSKASKAQQRKDDDENGNRAVIQTQLEEIIFLGNVFDKSIRRFTCPFATCNVNYSTFLNLKNHVKKTHEETLQKPIETDTNNWRRIQNANNRFDITTVKQKLRPLIIDGETIIKKQRVLEPLATEKTEVATKVFDIMNKQAVELSKLAILFSSLVYFDVYNTISDPENGNEIDRIFEEEFNWKEMILEFKQFQRNTAKAKKPRPDKHNTFFDLCRKYDVETYFTETSQNAWNSIVDTFATNFKTNITTHLYSRIRKWLAFKLRDGKKKKDVCGKENRKDINNKIYHTIKFLFDSEKCTQAEEVQHELICELQKICQFPNFNHGGRSYFERLRYDFKEDGDDDLGKPKRKRKCAAPKKTTKKSKKKKKKTQNNGPRLNWFQMVPAMVRLQRRIYEINLSRKQTLIDAGIIKEKKKRKRKRKRKRKRKNESKPEPSSTENKRQAGGTKKKREIDPEATHYAKLPNFIVVPQNSFHTMHFPIDTKALFDILKNLPQFKAILNQAEFLELQIDDDPNRKTTNPFWYFLFNIQKMETATKKFGGRITTNGSDVSIQYCKLRKEKELTKAEILEMASNRKRKHDVIDSDSESESEDDDDDDDDDNAKTIKTDPAIVSALTNITNMEDLSVSGVDLGVRNVAATVIRKWSKSSDGYEVHESNVLHKSKDYHYKAGFARRQRKGKKLHGEFDERYQKDRQSQPIEPSQRSPDYIKFLDSRLKWFNEGTATYMQRVVTNVKFDKFRSTQKQMMAMAKEIVGDINVHDKATTQPSKIRVVFVGNCSTPANSTIKGHRRSPGNAPIVRYLKQIPQTYVDATIDEYCTTKKCSRCYETLDDVEFSKERLKLCHNCKLAENSTSTNLVSTYQRKQVIAEAMIPITEDYPKPTQFERAQRVAMERTKRWSFGDKMRMAARIKLKSTTYTVNTTATLKHLYWNRDGNAARNIMQLGLCQYNDCLPIEFNKDEAFQRPKKKD

SEQ ID NO: 3451 - protein, 830 aa, Bradysia coprophila
MNKQAVELSKLAILFSSLVYFDVYNTISDPENGNEIDRIFEEEFNWKEMILEFKQFQRNTAKAKKPRPDKHNTFFDLCRKYDVETYFTETSQNAWNSIVDTFATNFKTNITTHLYSRIRKWLAFKLRDGKKKKDVCGKENRKDINNKIYHTIKFLFDSEKCTQAEEVQHELICELQKICQFPNFNHGGRSYFERLRYDFKEDGDDDLGKPKRKRKCAAPKKTTKKSKKKKKKTQNNGPRLNWFQMVPAMVRLQRRIYEINLSRKQTLIDAGIIKEKKKRKRKRKRKRKRKNESKPEPSSTENKRQAGGTKKKREIDPEATHYAKLPNFIVVPQNSFHTMHFPIDTKALFDILKNLPQFKAILNQAEFLELQIDDDPNRKTTNPFWYFLFNIQKMETATKKFGGRITTNGSDVSIQYCKLRKEKELTKAEILEMASNRKRKHDVIDSDSESESEDDDDDDDDDNAKTIKTDPAIVSALTNITNMEDLSVSGVDLGVRNVAATVIRKWSKSSDGYEVHESNVLHKSKDYHYKAGFARRQRKGKKLHGEFDERYQKDRQSQPIEPSQRSPDYIKFLDSRLKWFNEGTATYMQRVVTNVKFDKFRSTQKQMMAMAKEIVGDINVHDKATTQPSKIRVVFVGNCSTPANSTIKGHRRSPGNAPIVRYLKQIPQTYVDATIDEYCTTKKCSRCYETLDDVEFSKERLKLCHNCKLAENSTSTNLVSTYQRKKVIAEAMIPITEDYPKPTQFERAQRVAMERTKRWSFGDKMRMAARIKLKSTTYTVNTTATLKHLYWNRDGNAARNIMQLGLCQYNDCLPIEFNKDEAFQRPKKKD

SEQ ID NO: 3452 - protein, 1289 aa, Bradysia coprophila
MKNTKELSSDSDTDIEKRQRKWQHQRQQKGNKKPKKRGQSNGNGNGKDSDDDFVSTKKVYNSPPKLPNVAAVGRRKNVIPKKPPVSSNVNVNVLDSPPKLPNVAAAPKKPPVSSAAINAALLNATTKDRSSSPSNATAASNPAINITSHRNTTSSIIGSGRTGSTQEVAHPLPIRQSPPPMEYGSEWDTDGEATIAQLKQMQRKRPSKKAHSTSTKPEVKQTPVQSNRKRAASTDEASDAVEATTKRSTSTKRSKASKRSKATKTQQDSADEAGDADEETTKRSTSTKRSKASKRSKVTKTQQDSADEAGDADEATTKRSTSTKRSKASKAQQRKDDDENGNRAVIQTQLEEIIFLGNVFDKSIRRFTCPFATCNVNYSTFLNLKNHVKKTHEETLQKPIETDTNNWRRIQNANNRFDITTVKQKLRPLIIDGETIIKKQRVLEPLATEKTEVATKVFDIMNKQAVELSKLAILFSSLVYFDVYNTISDPENGNEIDRIFEEEFNWKEMILEFKQFQRNTAKAKKSRPDKHNTFFDLCRKYDVETYFTETSQNAWNSIVDTFATNFKTNITTHLYSRIRKWLAFKLRDGKKKKDVCGKENRKDINNKIYHTIKFLFDSEKCTQAEEVQHELICELQKICQFPNFNHGGRSYFERLRYDFKEDGDDDLGKPKRKRKCAAPKKTTKKSKKKKKKTQNNGPRLNWFQMVPAMVRLQRRIYEINLSRKQTLIDAGIIKEKKKRKRKRKRKRKRKNESKPEPSSTENKRQAGGTKKKREIDPEATHYAKLPNFIVVPQNSFHTMHFPIDTKALFDILKNLPQFKAILNQAEFLELQIDDDPNRKTTNPFWYFLFNIQKMETATKKFGGRITTNGSDVSIQYCKLRKEKELTKAEILEMASNRKRKHDVIDSDSESESEDDDDDDDDNAKTIKTDPAIVSALTNITNMEDLSVSGVDLGVRNVAATVIRKWSKSSDGYEVHESNVLHKSKDYHYKAGFARRQRKGKKLHGEFDERYQKDRQSQPIEPSQRSPDYIKFLDSRLKWFNEGTATYMQRVVTNVKFDKFRSTQKQMMAMAKEIVGDINVHDKATTQPSKIRVVFVGNCSTPANSTIKGHRRSPGNAPIVRYLKQIPQTYVDATIDEYCTTKKCSRCYETLDDVEFSKERLKLCHNCKLAENSTSTNLVSTYQRKKVIAEAMIPITEDYPKPTQFERAQRVAMERTKRWSFGDKMRMAARIKLKSTTYTVNATATLKHLYWNRDGNAARNIMQLGLCQYNDCLPIEFNKDEAFQRPKKKD

SEQ ID NO: 3453 - protein, 1285 aa, Bradysia coprophila
MKNTKELSSDSDTDIEKRQRKWQHQRQQKGNKKPKKRGQSNGNGNGKDSDDDFVSTKKVYNSPPKLPNVAAVGRRKNVIPKKPPVSSNVNVNVLDSPPKLPNVAAAPKKPPVSSAAINAALLNATTKDRSSSPSNATAASNPAINITSHRNTTSSIIGSGRTGSTQEVAHPLPIRQSPPPMEYGSEWDTDGEATIAQLKQMQRKRPSKKAHSTSTKPEVKQTPVQSNRKRAASTDEASDAVEATTKRSTSTKRSKASKRSKATKTQQDSADEAGDADEETTKRSTSTKRSKASKRSKVTKTQQDSADEAGDADEATTKRSTSTKRSKASKAQQRKDDDENGNRAVIQTQLEEIIFLGNVFDKSIRRFTCPFATCNVNYSTFLNLKNHVKKTHEETLQKPIETDTNNWRRIQNANNRFDITTVKQKLRPLIIDGETIIKKQRVLEPLATEKTEVATKVFDIMNKQAVELSKLAILFSSLVYFDVYNTISDPENGNEIDRIFEEEFNWKEMILEFKQFQRNTAKAKKPRPDKHNTFFDLCRKYDVETYFTETSQNAWNSIVDTFATNFKTNITTHLYSRIRKWLAFKLRDGKKKKDVCGKENRKDINNKIYHTIKFLFDSEKCTQAEEVQHELICELQKICQFPNFNHGGRSYFERLRYDFKEDGDDDLGKQKRKRKCAAPKKTTKKSKKKKKKTQNNGPRLNWFQMVPAMVRLQRRIYEINLSRKQTLIDAGIIKEKKKRKRKRKRKNESKPEPSSTENKRQAGGTKKKREIDPEATHYAKLPNFIVVPQNSFHTMHFPIDTKALFDILKNLPQFKAILNQAEFLELQIDDDPNRKTTNPFWYFLFNIQKMETATKKFGGRITTNGSDVSIQYCKLRKEKELTKAEILEMASNRKRKHDVIDSDSESESEDDDDDDDDNAKTIKTDPAIVSALTNITNMEDLSVSGVDLGVRNVAATVIRKWSKSSDGYEVHESNVLHKSKDYHYKAGFARRQRKGKKLHGEFDERYQKDRQSQPIEPSQRSPDYIKFLDSRLKWFNEGTATYMQRVVTNVKFDKFRSTQKQMMAMAKEIVGDINVHDKATTQPSKIRVVFVGNCSTPANSTIKGHRRSPGNAPIVRYLKQIPQTYVDATIDEYCTTKKCSRCYETLDDVEFSKERLKLCHNCKLAENSTSTNLVSTYQRKKVIAEAMIPITEDYPKPTQFERAQRVAMERTKRWSFGDKMRMAARIKLKSTTYTVNATATLKHLYWNRDGNAARNIMQLGLCQYNDCLPIEFNKDEAFQRPKKKD

SEQ ID NO: 3454 - protein, 340 aa, Bradysia coprophila
MVGVDPGYKLYIAALIKDTRTNTEKHIKISSKSFYSMTRQNYRDKKSKKWTAEYETAAKLDREDVNVYDEYPSSLTPQYMNYISHCMKFFHRGHEIYTTRKYSRLQLDQYIRTQQSMDSIVHTLTDNVGNGRILVCIEGKPFNPSSPIRKYRRCPGIRKLFQCLKKVPVCDVMFVDEYNTSKACGCCYRSFDQPKHKHWDTRKIRHRVCDDCHPDAEIISLPNTIIAPKSQRQLQTEKREVRHLIYQDNPSISWNESAQLANLKFAFLPEHKKHNQFQKVPFNPAIHKAVQKTVWNRDISAARNMIVKGVCALSNIATPASLTRATTATVADSDTSDEDY

SEQ ID NO: 3455 - protein, 607 aa, Bradysia coprophila
MYETNFKNNVKTHAQKRIVRLFKLWFIEANGVKPSSRHMKVLKNAATFMFKRKSTVPRNPYLTQRLMMYMPPQIVAMVANSNERGFMNKLHNAFNWFRMVPLYLRIQSDIDQYQATCRAADEPIHVRNFHVVPLHNSKTKYIRIDSATLKLMLQHLKIHPTKPSLKQPNKRVCLTNAEFEDAVDPTGTFNPNWFNYFKWSAVKKMQRHKEFDYQFLTNGVAVSLQFIVDQPPEPETFEKVMEKQKIKYRKFGQRFNNNQYKTIIGIDPGYKLYLAAVSKDMRTNEETLFRLTSRKFHNMCQQNIRDRKAKRYTSQLETEMAHDREVNFGGTIASPMSATNYMLFIDHRLKHFNSCIALYTQNKYTELAFHKYVHTQKAMDGIVNELLPSSRSHERSLLVIGGTEFNPSAPIKKYRRCPGVRQLVKFVRKRTGCDIVYADEYNTSQVCGRCQRRFKTSDDETIQHKRWERKGARMRLCSNCTPNDNIIPLPTTINTRMSPRAQHLHRLAITNRLFFNVAAYSMEDAKRESDNIHYIAENCCYDVSHDKHTFDPNDRTTQLKCVWNRDISAARNILIKGVASITGIPAPRTLYRQTQINEENSSDESMD

SEQ ID NO: 3456 - protein, 1287 aa, Bradysia coprophila
MKNTKELSSDSDTDIEKRQRKWQHQRQQKGTKKPKKRGQSNGNGNGKDSDDDFVSTKKVYNSPPKLPNVAAVGRRKNVIPKKPPVSSNVNVNVLDSPPKLPNVAAAPKKPPVSSAAINAALLNATTKDRSSSPSNATAASNPAINITSHRNTTSSIIGSGRTGSTQEVAHPLPIRQSPPPMEYGSEWDTDGEATIAQLKQMQRKRPSKKAHSTSTKPEVKQTPVQSNRKRAASTDEASDAVEATTKRSTSTKRSKASKRSKATKTQQDSADEAGDADEETTKRSTSTKRSKASKRSKVTKTQQDSADEAGDADEATTKRSTSMKRSKASKAQQRKDDDENGNRAVIQTQLEEIIFLGNVFDKSIRRFTCPFATCNVNYSTFLNLKNHVKKTHEETLQKPIETDTNNWRRIQNANNRFDITTVKQKLRPLIIDGETIIKKQRVLEPLATEKTEVATKVFDIMNKQAVELSKLAILFSSLVYFDVYNTISDPENGNEIDRIFEEEFNWKEMILEFKQFQRNTAKAKKPRPDKHNTFFDLCRKYDVETYFTETSQNAWNSIVDTFATNFKTNITTHLYSRIRKWLAFKLRDGKKKKDVCGKENRKDINNKIYHTIKFLFDSEKCTQAEEVQHELICELQKICQFPNFNHGGRSYFERLRYDFKEDGDDDLGKPKRKRKCAAPKKTTKKSKKKKTQNNGPRLNWFQMVPAMVRLQRRIYEINLSRKQTLIDAGIIKEKKKRKRKRKRKRKRKNESKPEPSSTENKRQAGGTKKKREIDPEATHYAKLPNFIVVPQNSFHTMHFPIDTKALFDILKNLPQFKAILNQAEFLELQIDDDPNRKTTNPFWYFLFNIQKMETATKKFGGRITTNGSDVSIQYCKLRKEKELTKAEILEMASNRKRKHDVIDSDSESESEDDDDDDDDNAKTIKTDPAIVSALTNITNMKDLSVSGVDLGVRNVAATVIRKWSKSSDGYEVHESNVLHKSKDYHYKAGFARRQRKGKKLHGEFDERYQKDRQSQPIEPSQRSPDYIKFLDSRLKWFNEGTATYMQRVVTNVKFDKFRSTQKQMMAMAKEIVGDINVHDKATTQPSKIRVVFVGNCSTPANSTIKGHRRSPGNAPIVRYLKQIPQTYVDATIDEYCTTKKCSRCYETLDDVEFSKERLKLCHNCKLAENSTSTNLVSTYQRKKVIAEAMIPITEDYPKPTQFERAQRVAMERTKRWSFGDKMRMAARIKLKSTTYTVNTTATLKHLYWNRDGNAARNIMQLGLCQYNDCLPIEFNKDEAFQRPKKKD

SEQ ID NO: 3457 - protein, 1289 aa, Bradysia coprophila
MKNTKELSSDSDTDIEKRQRKWQHQRQQKGNKKPKKRGQSNGNGNGKDSDDDFVSTKKVYNSPPKLPNVAAVGRRKNVIPKKPPVSSNVNVNVLDSPPKLPNVAAAPKKPPVSSAAINAALLNATTKDRSSSPSNATAASNLAINITSHRNTTSSIIGSGRTGSTQEVAHPLPIRQSPPPMEYGSEWDTDGEATIAQLKQMQRKRPSKKAHSTSTKPEVKQTPVQSNRKRAASTDEASDAVEATTKRSTSTKRSKASKRSKATKTQQDSADEAGDADEETTKRSTSTKRSKASKRSKVTKTQQDSADEAGDADEATTKRSTSTKRSKASKAQQRKDDDENGNRAVIQTQLEEIIFLGNVFDKSIRRFTCPFATCNVNYSTFLNLKNHVKKTHEETLQKPIETDTNNWRRIQNANNRFDITTVKQKLRPLIIDGETIIKKQRVLEPLATEKTEVATKVFDIMNKQAVELSKLAILFSSLVYFDVYNTISDPENGNEIDRIFEEEFNWKEMILEFKQFQRNTAKAKKPRPDIHNTFFDLCRKYDVETYFTETSQNAWNSIVDTFATNFKTNITTHLYSRIRKWLAFKLRDGKKKKDVCGKENRKDINNKIYHTIKFLFDSEKCTQAEEVQHELICELQKICQFPNFNHGGRSYFERLRYDFKEDGDDDLGKPKRKRKCAAPKKTTKKSKKKKKKTQNNGPRLNWFQMVPAMVRLQRRIYEINLSRKQTLIDAGIIKEKKKRKRKRKRKRKRKNESKPEPSSTENKRQAGGTKKKREIDPEATHYAKLPNFIVVPQNSFHTMHFPIDTKALFDILKNLPQFKAILNQAEFLELQIDDDPNRKTTNPFWYFLFNIQKMETATKKFGGRITTNGSDVSIQYCKLRKEKELTKAEILEMASNRKRKHDVIDSDSESESEDDDDDDDDNAKTIKTDPAIVSALTNITNMEDLSVSGVDLGVRNVAATVIRKWSKSSDGYEVHESNVLHKSKDYHYKAGFARRQRKGKKLHGEFDERYQKDRQSQPIEPSQRSPDYIKFLDSRLKWFNEGTATYMQRVVTNVKFDKFRSTQKQMMAMAKEIVGDINVHDKATTQPSKIRVVFVGNCSTPANSTIKGHRRSPGNAPIVRYLKQIPQTYVDATIDEYCTTKKCSRCYETLDDVEFSKERLKLCHNCKLAENSTSTNLVSTYQRKKVIAEAMIPITEDYPKPTQFERAQRVAMERTKRWSFGDKMRMAARIKLKSTTYTVNTTATLKHLYWNRDGNAARNIMQLGLCQYNDCLPIEFNKDEAFQRPKKKD

SEQ ID NO: 3458 - protein, 272 aa, Bradysia coprophila
MDRQSGNEEPSSKNPDYRQYLTSRLKWFNEATQAYMHRQVTNLQFAKYRSTQTAMTQMAREIVGEVDVVGHKLEEKSCRIVFMGNCSTPANSTIRGHRRAPTGKKLSRYLQQRRNVIIISTPETNSTKNCSRCYEPLDNVESSKERLKICTKFCTPARDSMPAHHITTYTSKRSIKRKMKKVGTKPSQSERKSRVSMNRIDRWSIDDKIRIAKRLTLKRTIYVGPIPARHNILWNRDINAARNIGYLGLCRYGKFIDSSLNTTENTAFSRST

SEQ ID NO: 3459 - protein, 1110 aa, Bradysia coprophila
MEYGSEWDTDGEATIAQLKQMQRKRPSKKAHSTSTKPEVKQTPVQSNRKRAASTDEASDAVEATTKRSTSTKRSKASKRSKATKTQQDSADEAGDADEETTKRSTSTKRSKASKRSKVTKTQQDSADEAGDADEATTKRSTSTKRSKASKAQQRKDDDENGNRAVIQTQLEEIIFLGNVFDKSIRRFTCPFATCNVNYSAFLNLKNHVKKTHEETLQKPIETDTNNWRRIQNANNRFDIATVKQKLRPLIIDGETIIKKQRVLEPLATEKTEVATKVFDIMNKQAVELSKLAILFSSLVYFDVYNTISDPENGNEIDRIFEEEFNWKEMILEFKQFQRNTAKAKKSRPDKHNTFFDLCRKYDVETYFTETSQNAWNSIVDTFATNFKTNITTHLYSRIRKWLAFKLRDGKKKKDVCGKENRKDINNKIYHTIKFLFDSEKCTQAEEVQHELICELQKICQFPNFNHGGRSYFERLRYDFKADGDDDLGKPKRKRKCAAPKKTTKKSKKKKKKTQNNGPRLNWFQMVPAMVRLQRRIYEINLSRKQTLIHAGIIKEKKKRKRKRKRKRKRKNESKPEPSSTENKRQAGGTKKKREIDPEATHYAKLPNFIVVPQNSFHTMHFPIDTKALFDILKNLPQFKAILNQAEFLELQIDDDPNRKTTNPFWYFLFNIQKMETATKKFGGRITTNGSDVSIQYCKLRKEKELTKAEILEMASNRKRKHDVIDSDSESESEDDDDDDDDDNAKTIKTDPAIVSALTNITNMEDLSVSGVDLGVRNVAATVIRKWSKSSDGYEVHESNVLHKSKDYHYKAGFARRQRKGKKLHGEFDERYQKDRQSQPIEPSQRSPDYIKFLDSRLKWFNEGTATYMQRVVTNVKFDKFRSTQKQMMAMAKEIVGDINVHDKATTQPSKIRVVFVGNCSTPANSTIKGHRRSPGNAPIVRYLKQIPQTYVDATIDEYCTTKKCSRCYQTLDDVEFSKERLKLCHNCKLAENSTSTNLVSTYQRKKVIAEAMIPITEDYPKPTQFERAQRVAMERTKRWSFGDKMRMAARIKLKSTTYTVNTTATLKHLYWNRDGNAARNIMQLGLCQYNDCLPIEFNKDEAFQRPKKKD

SEQ ID NO: 3460 - protein, 519 aa, Mercenaria mercenaria
MNRKRSLSPLTLWKAAHVFKHQNLECWFQFAKDGESHNKVFASDFERTRKRAKLEDEKTFMTTFSVGIRPTRNQKRVLNEMLRVSNHAYNWCNYLVCEKNLKPKEYDLQKYVSKTNSSDVPTDFRMNNNDDWYFNNKMTKIRDAACKDFCTMYKSALTNQRKKKKYIKTVSLKDKDDMNPSHGAFEIQKALIRKLKETDSDDYDILNNCLSVMADNFTMRRKDVRNRFLRLSKPVSKLPPLEHAVKIVKTAKGKFVLHIPCEPTYTRSKRYDEPFDSLCGIDPGGRTFLTIYDPSKPRAFQIASRCKAPSKPVRKRTKKKGEKWHRKKKSQRRVGSTIDKIDSLHAKKDYVNSKMQAAIRRKQPQAKKDRQRQLQKVYYQLGNVIRWVHLRCTYNLMQYSYVAIGKIGIPSIIRRQCNGKRRRINKKSVRHLTVWNHCKFRERLVYRAKGTKTNVIVQDESYTSKTCSECGTINSKLGGSETFKCTNPSCDYITNRDVNGAKNILRKSLGIGSIKTYRA

SEQ ID NO: 3461 - protein, 478 aa, Mercenaria mercenaria
MKRKREQMTLWKAAFVNGRETFKSWIDKARMLELNCDISSASSTHYSDLDLKSKCAKIEDKFMCTFSVGIRPTSKQNRTLNQMLKVSNYAYNWCNHLVKEKDFKPKQFDLQRVVTKTNSHDVPAEYRLPGDDWFFDNKMSSIKLTACKNFCTMYKSARTNQKKTKVDLRNKDTALLREGSFEVQRQYVRLLTEKDIPDERIRQSRIALMADNFSKSKKDWKERFLRLSKNVSKIPPLNHDMKVCKRPNGKFILQIPCDPICTRQIQVHTSDSICSIDPGGRTFATCYDPSNIKTFQIGPEADKKEIIHKFHNKIDNVHRLLSYAQKKKQTQAVQDRIGQLKKLHLKLKTYVDDVHLKLCSYLVKNYKLVVLGRISVSSIVRKDRPNHLAKKGNRDLLCWQHFRFRQRLLHRVRGTDCEAIAQDERYTSKTCGNCGVQNNKLGGNETFHCKSCNYKTHRDVNGARNILCKYLGHFPFAT

SEQ ID NO: 3462 - protein, 463 aa, Mercenaria mercenaria
MKRKREQMTLWKAAFVNGRETFKSWIDKVRMLELNCDISSASSTHYSDLNLKTKCAKTEDKFMCTYSVGIRPTSKQKRTLNQMLKVSNYAYNWCNYLVKEKDFKPKQFDLQRVVAKTNSTDVPAEYRLPGDDWSFDNKMSGIKLTACKNFCTMYKSAQTNQKKTKVDLRNKDIVQLREGSFEVQSKYVSLLTEKDIPGERIRQLRIALMPDSFSKSKKDWKERFLRLSKNVSKIPPLSHDMKVCKRPDGKFILQIPCDPICTRQIQVQTSDSICSIDPGGRTFATCYDPSNIKAFQIGPEADKKEIIHEFHNKIDYVHRLLSHAQEKKQTQAVQDRIGQLKKLHLKLKTYVDDVHLKLCSYLVKNYKLVVLGKISVSSIVRKDRPNHLGKKGNRDLLCWGHYRFRQRLLHRVRGTDCEAITQDERYTSKTCGNCGVKNNKLGGKETFTYMKNKHLNVLDKTLT

SEQ ID NO: 3463 - protein, 478 aa, Mercenaria mercenaria
MKRKREQMTLWKAAFVNGRETFKSWIDKARMLELNSDVSSASSTHYSDLNLKSKCARIEDKFMCTFSVGIRPTSKQKRTLNQMLKVSNYAYNWCNYLVKEKDFKPKQFDLQRVVTKTNSTDVPAEYRLSGDDWFFDNKMSSIKLTACKNFCTMYKSAQTNQKKTKVDLRNKDITQLREGSFEVQKLFVRLLTEKDIPDELVRQSRIALMPANFSKYMKDWKERFLRLSKNVSKIPPLSHDMKVCKRPNGKFVLQIPCDPKYTRRIQVHTSDSICSIDPGGRTFATCYDPSNIKTFQIGPEADKKEIIHKFHNKIDQVHRLLSYAQKKKQTQAVQDRIGQLKKLHLKLKTYVDDVHLKLCSYLVKNYKLVVLGKISVSSIVRKDRPNHLAKSANRDLLCWQHFRFRQRLLHRVRGTDCEAIAQDERYTSKTCGNCGVKNNKLGGKETFICESCNYKTHRDVNGARNIMCKYLELFPFAA

SEQ ID NO: 3464 - protein, 478 aa, Mercenaria mercenaria
MKRKREQMTLWKAAFVNGQETFKSWIDKARMLELNCDVSSASSTHYSDLNLKTKCAKTDDKFMCNYSVCIRPTSKQKRTLNQMLKVSNYAYNWCNYLVKEKDFKPKQFDLQRIVAKTNSTDVPAEYRLPGDDWFFDNKMSSIKLTACKNFCTMYKSTQTNQKKTKVDLRNKDIVQLREGSFEVQSKYVRLLTEKDIPGERIRQSRIALMPDSFSKSKKDWKERFLRLSKNVSKIPPLSHDMKVCKRPNGKFILQISCDPICTRQIQVQTSDSICSIDPGGRTFATCYDPSNIKTFQIGPEADKKEIIHEFHNKIDYVHRLLSHAQEKKQTQAVQDRIGQLKKLHLKLKTYVDDVHLKLCSYLVKNYKLVVLGKISVSSIVRKDRPNHLAKSANRDLLCWQHYRFRQRLLHRVRGTDCEVIIQDERYTSKTCGNCGEKNNKLGGKETFTCESCNYKTHRDVNGARNILCKYLGLFPFAA

SEQ ID NO: 3465 - protein, 272 aa, Aphidius gifuensis
MKKNKNVAVGDANANDASGDSAGGGGGGGGALVVSAVPAPLAPAVVGESDNNKIKITKHQQKKENKVIKQQKLAEEYKKKFTPEELLQRSENRKQEQLKKKMYKKLRAEKYAEKSKEFLKKQLEDREAREQKKLFYQENPNYQQQQLQDNTNNNKIWTIVFIGQTKIMKKMKGYRKPPLRQLEKKLLMLENVIVIRVDEYYTTQNCSLCFQQAIVSQAGHRYTFCPHCKITWHRDINAARNIAKIGLAYSGINPNKTPKDFPTFDRKWRKKN

SEQ ID NO: 3466 - protein, 260 aa, Mayetiola destructor
MTTDGVSAHFVMRNKQKQKSKREVVDVNGDVLTPEIVGFIDDRIVREISDEMRQKYNNNEYKTIIGYDPGYKLPVAIVRKDIATGDETNFTMNWYEFRKLCGDVERKQKRYRVAAAGDFKFSANSPIRGSVRCPMRSLFNLLAQQYCDVVEIDEHLTSKLCSICGSRMIKKGTRKDRYFICKNKMPATSILPQAPAWTTKRHIDRIRDEFNELPLAGLFIHQDNGGRRIKRTIDLPTERRFHSNELDDHHYQLQQHEIIN

SEQ ID NO: 3467 - protein, 398 aa, Rhizopus delemar
MKYANQIASYEVVKIVTAYLNGVKNQGAENRDEEKRGTEKEIEATVKTITEQISKVKLAISSRIVEDMPKEFSSSNDLNKIRNLFDSYSTDYRFAKGSIYYDCKANPLKHIKSYYRLSSMCEALQNKSFNCFPLRKGFIPSYMTIDTYILNAQILKNSIIGHLDQEVVWGAVLNVTSKAIKPQGERKFMKFRGTIYTDGVDVSILKQNQDTKKKGDSSGGKPKSIKADEFQHIEKLGKEDLLAGIGKCCAAELFLSHFKSSAVNKDKFVEYLQERAEVTPVMKVYYLNEDRPAAEDQGAGGFLPFRKMKLSNFINQQQADKRLAKKLRERFGNDAILMLGNWSAGKVKYHEPIRGVGMRRMLAKEGFQVYLLDEFRTSSLCPSCQNSELETFKNSTKP

SEQ ID NO: 3468 - protein, 879 aa, Rhizopus delemar
MDRKVTGHKIDIIIDSFKLYVEDNSDDDFQPVAISRKRKSRENIPQSGSPKRLKGKGKATDSEVTTTSSIGISTTDEPIVFNKITLEDNDLEYSSDDFDAPVVKRPFLGESTKSAFGITKSTSAAVGSSTTTPKTSLTPPKPNEPVPTAFKSAAASVKSSDIKEDSKKMSKRVMTIKTTVKNIWKPAYLQPLYDLIHTTNLLVTHTFAFTKYIYLQSLAANENFELNNFVTKDFFVEVFLSLVLSKGGNSTRLKDTTKNYRRLISKYKEAYFEDASYSPTNLPYAQQIALYECTKIQTAYYNNIKAHFGNRLRSLINKLFKKKEKTESLRGEMQANKSSSKVIKEAIRKTIYRPCNRVKLAIAKKEMPEVGLLDDFLSSYPEDYTFQKNSIYYDVMASPKNHFKAFLRLAQLSEAEQTKQFACFPLRSTFIPCYMTLDSKIIHYHILKSKKNPKTGSKFETWGAAVDLNKKAFKNQGFQKSLRFQGTLETDGVGVSIIKQNTDTSRKSPKPNTEKKVDGNQTEHIEGLTQAELKSTEGKCVLIDPGRQDLMYCMKETSTVEEKQTLIFTKNNRSKCSRHFRYLRKNTQPFVVQKAEAVLSRSESNSDYYGNETYFPESEFDFRVDQKCNLYYVNLFTTKIRGFFPQPENYSTDSSVNSQLYATYLQIMLQQKHISERLDDSGKSKVLGLAKEMCRRSQKGNYKKTISTALEKLQLLPFRKLKFSSKLFFDQNDQKLVRSLRAKFGQDAVLVFGDWSAPNVKYQESTRSKGLIRMLKKNGFVVYLINEYKTSSHCPTCENELEKFKTVPNPRPYQRKKKPDVLCNGLLRCKGLSCLKQQTTGIKRRLWNRDQAAVLNFLKILSSLRKTGEHPSLFTRKYL

SEQ ID NO: 3469 - protein, 323 aa, Rhizopus delemar
MTIDTYILNTQNLKNSIISHLDKKVVWGAVLDVTSKAMKPQRERRFMKFRGTIYTDGIGVSVLKQNYDMKKKGGSSGEKSKSMEADEFQDEVIAAELFLPYFKSSTANKDKFVEYLQERTKVTPVMKACYLNEDRPAAEDQGAGGFLTFRKMKLSSFINQQQADKRLAKKLIERFGNDAILILGNWSAEKIKYHEPIRGVGMRKMLTKEGFQVYLLDELRTSSLYPSCQNGELEVFKKVQSPRPYQRENYPIADRPGPLRYENQQCLKVVTSTIEATAKFPLRRFWNRDIAATLNFRHILFSLRANSERPERFCRLKTSLHQL

SEQ ID NO: 3470 - protein, 1073 aa, Rhizopus delemar
MNRTKAKQSSRFVGTSTLPPRRKHHSNSKRPRPPSPGEGTSDSKRKRIQFSDTELDTFFFLSMENQLKENIRTVVCKNNKKMNEQLVALKQKLSTAKKLLRGIITGAAKLAESTYNEPSQADLILRQMRSFMDNRVGKKNEIEWQEFVVKKFDTFKNEETNLAKSAQLESNDTDRDSVPDADCPAVDENSYRACTASINKLIREDLDPSIKDLIMKKLQRAMIGSTDYILYFSSLIQMMMICLKTNQFFLDGDVINTRKVNGFDITTIVPSEFHTDSPKYTITPLAMDVSDSPAFDADFSQLFQEQHFSLISTKYFGNRGSQGQTLNAHPIQTALFKLMDAEDIKKETFPVENVPSSLMSLALKIYMTNFKNMWADKTMINKLLDKLLVTLLRLHLASKRELQRRQNILNYISQKPEEKRPSKNYGRYILRAEKKKLARYKEKVREAEADSDLLLKRIRAVKMAETRIRSLEEKFAQDLVTEKDVNDEFPDATRKEVSVCLLIINTLKKFVPVRSKYHILPYQLLFCIFANDLLHYNEYSKFTRKLCPSMSSAHINALNIDALSLFQIMKSKTDDNQGQVEGMSTELTIYGYNEEPLSSVEIARRNKDAVFNSLFDMEKVRHTCESNGLKFGQRMSILPKLKVVRILGVKKTTVPPVKPQKISYLKRILRDPNILREGQKPLEDLKAETAKLEKEVKSLDQEREKALKCQKEQDSIKKIKALRKEWHNKVDKQTLYQRIEEERHLRDKTYLKINDIEDQLMEKKQVFEACVLRDFEDFTFCGTDNGLVNMTAAVPFSLKRFSFHLKLHNYYSVLDDDNKAAPVVQDIELQKYLKIPKATIISANEIDFGCGAFKQRVKRQTGKKLTRKGKEVQLIENSLSQKVTSTSNVSVEQFKHNFDAHVEHRKKLRDFYNTGNRMNERRHREIQKHRFTHRICTKERKALSQTSGNSPSTKKKLVMFIGDRGTGVGSRIKGFKKYGGRWKEVIHSEAANVCITNENLTSKIFLSKCAAKSRDSLSALAIGIVGLSTILFGAPLPAFKSHKISKFEAEKYITLTSPSRFEEETGSYAVVLE

SEQ ID NO: 3471 - protein, 227 aa, Rhizopus delemar
MKVYYLNEDRPAEEDQGAGGFLPFRKMKLSSFINQQQVDKRLAKKLSERFGNDAILILGNWSAGKIKYHEPIRGVGMRRMLAKEGFQVYLLDEFRTSSLCPSCQNGELETFKKVQNPRPYQREKYSVVDRHGLLRCKNQQHLKVVTSTIEATDKVSLHRLWNHDMAATLDFRHIFFSLRANGERPERFCKSKKPLSTGSKRKNMSSSSASTSQPTKRPNNPLWLQLH

SEQ ID NO: 3472 - protein, 667 aa, Rhizopus delemar
MKGKQKDTLFSSNQKKPSKSENDSFELYVEDNPDDDYQPVSGSQKRLKGKVKAIDSEVTTTSSTDISTTDEPTVFNKITLEDYDLEYSSDDFDAPAIKSPFLDESSKSASRITKTTSAAVESSTAASKASINSPKPSKLVPTAFKSVATSVKSSFCPVPVDKASDIKEGPKKISKRVMTIKTTQIALYECTKIQTAYYNNIKVHFGNRLRSLINKLFKKKEKAESLRGEMQANKSSSKVIKEAIRKTIYRPCNRVKLAIAKKEMPEVGLLDDQSRTQFNDFLSSYPEDYTFQKNSIYYDVMASPKNHFKAFFRLAELSEVEQMKQFACFPLHSTFIPCYMTLDSKIIHYHILKSKKNPKTGSKFETWGAAVDLNKKAFKNQGFQKSLRFQGTLETDGVGVSIIKQNIDTSRKSPKTNTEKKVDARINGFFPQPMNHYTDSSVKSQLYDTYLQIMLQRKHISERLDDSEKSKALGLAKEMYRRSQKSNYKKTISTTLEKLQLLPFRKLKFSSKLFFDQNDQKLVRSLRAKFGQDAVLVSGDWSAPNAKYQESTRSKGLIRMLKRNGFVVYLINEYKTSSHCPTCENELEKFKTVPNPRPYQRKKKPDVLCNGLLRCKSSSCLKQQTTGIKRRIWNRDQAAVLNFLKILNSLRKTGERPSLFTRKYPLD

SEQ ID NO: 3473 - protein, 337 aa, Rhizopus delemar
MTIDTYILNTQILKNSIISHLDKEVLWGAVLDVTSKAMKPQGERKYMKFRGTIYTDGVGVSVLKQSYDTMKKGGSSGGKPNSIEADEFQYIEKLGKEDLLTGVGKCVLIDPGRRDLLYYKFVEYLQERAKVTPVMKAYYLNEDRPAAEDQGAADKRLAKTLRERFGNDAILILGNWSAGNVKYHEPIRGVGMRRMLAKEGFQVYLFDEFRTSSVCPSCHNGGLETFKKVQNPRPYQREKYPVVDRHGHLRCKNQQCLNDVMSTMEATAKVPLHRLWNRDMAATLNFRHILFSLRANGERPEHFCRSKKPLSTGSKRKNMSSSSASTSRPTKRPNNPL

SEQ ID NO: 3474 - protein, 1269 aa, Rhizopus delemar
MTLPRLLKESRTSMKVNCTAKLNKYFLTDNSISVDYVWKHANHDLPMMLKILYNLVCLPSSVALCCEEYVEDTEKYLSMYNSIVKRKLNEVKGDVENLDQLLSYTMNRTKAKQSSRFVGTSTLPPRRKHRSNSKRPRSSSPGEGASDNKRKRIQFSDTELDAFFFLSMENKLKESIRTVVRKNNKKMNGQLAALKQKLSTAKKLPIGIITGDAKLAESTYNEPSQADLILRQIRSFMDNRVGKKNEIEWQEFVVKNFDTFKNEETNLAKSAQPESNDTDRDSVPDADRPVVDENSYRTCTASINKLIREDLDPSIKDLIIKKLQRAMIVPSEFHTDSPKYTITPLAMDVSDSLAFNADFSQLFQEQHFSLISTKYFSNRGSQDQTLNEHPIQTALFKLMDAENIKKETFPVGNVLSSLMSLALQIYVTNFKNMWADKIIVNKLLDKLLVILLPLHLAPKRELQRRQNILNYISRKPEEKRPSKSYGRYILRAEKKKLARYKEKVREAEADSELLLKRIRAVKMAETRIRSLEEKFAQKQDASSSIREKSVESTTTAKKETTPCDDLSRGRISQLKSGAKHLIFSKDLVTEKDVKDEFPDATRKEVSVCLLIINTLKKFVPVRSKYHILPYQLLFCIFANDVLHYAEYSKFTRKLCPAMLSAHVNALNIDAPSLFQIMKSKTDDNQGQVEGMSAELTIYSYNKEPLPSVEIARRNKDAVFNSLFDMEKVRHTCESNGLKFGQRMSVLPKLKVVRILGVKKTTAPPVKLQNMSYLKRILRDPNILREGQKSLEDLKAETAKIEKEVKSLDQEREKALKCQKEQDSMKKIKALRKEWHNKVDKQTLYQRIEEERHLRDKTYLKINDIEDQLMEKKQVLYYQRMAIRHNSRIHTVDTASAPPTTKKELKKDSRALVHSEACVLRDFEDFTFCGTDNGLVNMTAAVPFSLKRFSFHLKLHNYYSVLDDDNKAAPVVQGIELQKYLKTPKATTISASEIDFGCGAFKQRVKRQTGKKLTRKGKEVQLIENSLSQKVTSTSNVSVEQFKYNFEHRKKLRDFYNTGNRMNERRHREIQKHRFTHRICTKERRALSQTFGNNLSTKKKLVMFIEDRGTGVGSRIKGFKKYGGRWKEVIHSEAANVCVTNENLTSKTCIFCFRRLTHPRISVTKNGEVFSRKVKGSFYCTNPLCVSVLSKCAAKSRDSLSALAIGIVGLSTILFGVPLPAFKSHKISNIEAEKYIILTSPSRFEEENGSYAVVLEVRKDQARLITQKQN

SEQ ID NO: 3475 - protein, 1133 aa, Rhizopus delemar
MNKTKAKQSSRFVGTSTLSDVFFLVVNSKRPRSSSPGEGTSDNKHKRIQFSDIELDAFFFLSTENKLKESIRTVVCKNNKKMNEQLVALKQKLSTAKKLLRGIITGAAKLAESTYNEPSQADLILRQMRSFMDNRVGKKNEIEWQEFVVKKFDTFKNEEINLAKSAQLESNDADCDSVPDADCPAVDENSYRTCTASINRLIREDLDPSIKDLIMKELQRAMIGSTDYILDSPAFDADFSQLFQGQHFSLISTKYFNNRGSQDQTLNAHPIQTALFKLMDAEDIKKETFPVENVPSSLMSLALQIYMTNFKNMWADKTMINKLLDKLLVTLLRLHLAPKRGLQRRQNILNYISRKSEEKRPSKNYGHYILSAEKKKLARYKEKVREAEAGSCLLLKRIRAVKMAETRIRSLEEKFAQKQDASSSSREKSVESTTTTKKETTPCDGLSRGRISQLKSGAKHLIFSKDLVTEKDVNDEFPDATRKEVSVCLLIINTLNKFVPVRSKYHILSYQLLFCIFVNDVLHYAEYSKFTRKLCLAMSSAHVNALNIDAPSLFQIMKSKTDGNQGQVEGMSTELTIYGYNEEPLSSVETARRNKDAVFNSLFDMGKVRLTCESSGLKFGQRMSVLPKLKVVRILGVKKTNAPPVKPQKMFYLKRILRDPNVLREGQKPLEDLKAETAKLEKEVRGSKKRDIWDKTYLKINDIEDQLMEKKQVLYYQRMAIRHNSRIHIVDTASAPPTTKKELKKDSCGLVHTEACVLRDFEDFTFCGTDNGLVNMTAAVPFSFKRFSFQLKLHNYYSVLDDDNKAAPVVQNIELQKYLKTPKATTISASEIDFDCGAFKQRVKRQTGKKLTRKGKEVQLIENSLSQKVTSTSNVSVEQFKHNFDAHVEHRKKLRDFYNTGNGMNERRHREIQKHRFTHRICTKERKALSQTSGNSPSTKKKLVMFIGDRGAGVGSCIKGFKRYGGRWKEAIHSEAANVCVTNENLTSKACIFCFRRLTHPRISVTKNGEVFSRKVKGNIYCTNPLCVSVLSKCAAKSRDSLSALAIGIVGLSTILFGVPLPAFKSHKISNIEAEKYTILTSPSRFEEENGSYVVVLEARKGSSKVDHPEAKLKFIYLIVTVFYDGSFNVAPR

SEQ ID NO: 3476 - protein, 1052 aa, Rhizopus delemar
MTPNDVKDIVQSRLSAEVKRWIEEHVDDAINTSIDNDNSSSATLCCEEYVEDTEKYLSMYNSIVKRKLNEVKGDVENLDQLLSYTMNRTKAKQSSRFVGTSTLSDVFFLVVNSKRPRSSSPGEGTSDNKHKRIQFSDIELDAFFFLSMENKLKESIRTVVCKNNKKMNEQLVALKQKLSTAKKLLRGIITGAAKLAESTYNEPSQADLILRQMRSFMDNRVGKKNEIEWQEFVVKKFDTFKNEEINLAKSAQLESNDTDCDSVPDADCPAVDENSYRTCTASINRLIREDLDPSIKDLIMKELQRAMIGSTDYILDSPAFDADFSQLFQGQHFSLISTKYFNNRGSQDQTLNAHPIQTALFKLMDAEDIKKETFPVENVPSSLMSLALQIYMTNFKNMWADKTMINKLLDKLQVTLLRLHLAPKRGLQRRQNILNYISRKSEEKRPSKNYGHYILSAEKKKLARYKEKVREAEAGSCLLLKRIRAVKMAETRIRSLEEKFAQKQDASSSSREKSVESTTTTKKETTPCDGLSRGRISQLKSGAKHLIFSKDLVTEKDVNDEFPDATRKEVSVCLLIINTLNKFVPVRSKYHILSYQLLFCIFVNDVLHYAEYSKFTRKLCPAMSSAHVNALNIDAPSLFQIMKSKTDGNQGQVEGMSTELTIYGYNEEPLSSVETARRNKDAVFNSLFDMGKVRLTCESSGLKFGQRMSVLPKLKVVRILGVKKTNAPPVKPQKMSYLKRILRDPNVLREGQKPLEDLKAETAKLEKEVRGSKKRDIWDKTYLKINDIEDQLMEKKQVLYYQRMAIRHNSRIHIVDTASAPPTTKKELKKDSRGLVHSEACVPRDFEDFTFCGTDNGLVNMTAAVPFSLKRFSFQLKLHNYYSVLDDDNKAAPVVQNIELQKYLKTPKATTISASEIDFDCGAFKQRVKRQTGKKLTRKGKEVQLIENSLSQKVTSTSNVSVEQFKHNFDAHVEHRKKLRDFYNTGNGMNERRHREIQKHRFTHRICTKERKALSQTSGNNPSTKKKLVMFIGDRGAGVGSRIKGFKRYGGR

SEQ ID NO: 3477 - protein, 1043 aa, Rhizopus delemar
MNEQLAALKQKLATAKKLPSGIITGAAKLAESAYNEPSQADFILQQMRSFMDNRVGKKNEIEWQEFVVKNFDTFKNEETNLAKSAQPESNDTDRDSVSDADCPIVDENSYRTCTASINKLIREDLDPSIKGLIMKKLQRAMIGSTDYILYFSSLIQMMMICLKTNQFFLDGDVINTRKVNGFNITSIVPSEFHTDSPKYTITPLAMDVRDSPAFDADFSQLFQEQHLSLISTKYFDNRGSQDQTLNAHPIQTALFKLMDVEDIKKETFPVENVPSGRMSLALQIYMTNFKNMWAGKTMINRLLDKLLVILLRLHLAPKRELQRRQNILNYISRKSEEKRSSKNYGRYILRAEKKKLARYKEKVREAEADSGLLLKRIRAVKMAETRIKSLEEKFAQKQDASSSSREKSVESTATTKEETTPCGDLSRGRISQLKSGAKHLIFSKDLVTEKDVNDEFPDAMRKEVSVCLLIINTLKKFVPARSKYHILSYQLLFCIFANDVLHYAEYSKFTRKLCPAMSSAHVNALNIDVPSLFQIMKSKIDDNQGQIEGMSTELTIYGYNTEPLFSVEIARRNKDAWFEIWSTNVSPSQIESGTNSWRKDETSKLEKEVKSLDQEREKALKYQKEQDSIKKIKALRKEWHNKVDKQTLYQRIEEERHLRDKTYLKINDIEDQLMEKKQVLYYQRMTIRHNSRIDTVDTASAPPTTKKELKKDSRGLVHSEACVLRDFEDFTFCGTDNGLVNMTAAVPFSLKRFSFHLKLYNYYSVLDDDNKAAPVVQDIELQKYLKTPKATIISASEIDFGCGAFKQRIKRQTGKKLTRKMNERRHREIQKHRFTHRICIKERKALSQTSGNNPSTKKKSVMFIGDRGTGVGSRIKGFKRYGGRWKEVIHSEAANICVTNENLTSKACVFCFRRLTHPLISVTKNGDVFSRKVKVSFYCTNPLCVSVLSKCAAKSRDSLSELANGIVGLSTILFGNPLPAFKPHKISNIEAEKYIILTSPSRFEEETGSHAVVLEVRKGSSKVDHPEIKIYLSDSDGILRRVV

SEQ ID NO: 3478 - protein, 256 aa, Rhizopus delemar
MNTNNITNMSDNLKTFHAIPLPAMANALCDIDEAENLCLAEYLENIQKYHNSFNSIYQQKMSKIKSDMRMHTLNNPSTKKKLAMFIGDRGTRVGSRIKGFKKYGGRWKEVIHSEATNVCVTNENLTSKTCIFCFRRLTHPRISVTKNGEVFSRKVKGSFYCTNPLGVSVLSKCAAKSRDSLSALAIGIVGLSTILFGAPLPAFKSHKISKIEAEEYIILTSPSRFEEETGSYAVVLEVRKGSSKVDHPEAKLNLFV

SEQ ID NO: 3479 - protein, 1277 aa, Rhizopus delemar
MFNIQSAFTYRTVPDYAEEYIKLSLQKEIDVKKEPAENDSPSSVKRIRTSMKVNCTAKLNKYFLTDNSISVDYVWKHVNHDPLHDVKDIVQSRLPTEVKRWIEEHVDDAINTSIDNDNSNSIALRCEEYVEDTEKYLSMYNSIVKRKLNEVKGDVENLDQLLIVTSYTMNRTEAKQSSRFVGTSTLLPRRKHHSNSKRPRSSSPGEETSDNKRKRIQFSDTELDTFFFLSMENKLKESTRTVVRKNNKKMNEQLAALNQADLVLQQMRSFMDNRVGKKNEIEWQGLVVKKFDAFKNEETNLAKSAQPESNDTGRDSVSDADCPAVDEDLYRTCTAPINKLIREDLDPSIKDLIMKKLQRVMIGSTDYILYLSSLIQMMMICLKTNQFFLDGNVINTRKVNGFDITTIVPSEFHTDSPKYTITPLAMDVSDSSAFDADFSQLFQEQHFSLISTKYFGNRGSQDQTLNAHPIQTALFKLMDAEDIKKETFPVENVPSSLMSLALQIYVTNFKNMCADKTMINKLLDKLLVILLRLHLAPKRELQRRQNILNYISRKPEEKRPSKNYGRYILRAEKKRLARYKEKVREAEANSDLLLKRIRAVKMAETRIRSLEEKFAQDASTSSREKSVESTTTTKKETTPCDDLSRGRINVNDEFPDATRKEVSVCLLIINTLNKFVPVRSKYHILPYQLLFCIFVNDVLHYAEYSKFTRNLYPAMSSAHVNALNIDSPSLFQIMKSKIDDNQGQVEDMSTELTIYGDNEEPLSSVEIARRNKDAVFNSLFDMEKVRHTCESNGLKFGQRMSVLPKLKVVRILGVKKTTVPPVKPQKMSYLKRILRKPNFLREGQKPLEDLKAETAKLEKEVKSLDQEREKVLKYQKEQDSIKKIKALRKEWHNKLDKQTLYQRIEEERQLRDKTYLKINDIEDQLMEKKQVLYYQRMAIKHNSRIHTVDTASALPTTKTELKKDSRGLVHSEACVLRDFEDFTFCGTDNGLVNMTAAVPFSLKRFSFHLKLHNYYSVLDDDNKAAPVVQVIEIQKYLKTPKATTISASEIYFGCGAFKQRVKRQTGKKLTRKGKEVQLPENSLSQKVISTSNVSVEQFKHNFDAHVEHRKKLRDFYNTGNRMNERRHREIQKHRFTHRICTKERRALSQTFGNNLSTKKKLVMFIEDRGTGVGSRIKGFKRYGGRWKEVIHSEEANVCVTNENLTSKTFLSKCAAKSRDSRLALAIGIVGLSTILFGAPLPAFKSHKISKIEAEKCITLTSPSRFEEETGSYAVVLE

SEQ ID NO: 3480 - protein, 267 aa, Rhizopus delemar
MAIRHNSRIHTVDTASTLPTTKKELKKDSRGLVHSEACVLRDFEDFTFCGTDNGLVNMTADVPFSLNRFSFHLKLHNHYSVLDDDNKAAPVVQDIELQKYLKTPKATIISASEIDFGCGAFKQRVKRQTGKKLTRKGKEVQLIENSLSQKVISTSNVSVEQLKHNFDAHVEHRKKLRGFYNTGNRMNERRHREIQKHRFTHRICTKERKALSQTSGNNPSTKKKLVMFIGDRGTEVGSHIKGFKNTVDGEKRSSTPKEQTFALPMRT

SEQ ID NO: 3481 - protein, 508 aa, Rhizopus delemar
MSSPFYCKGLSVAQRKALSHYVYTLKQKQQSIWPSSLERNQCLEETIEKMNALWSRYQTMNCDAEDLYSKPHEFFKWLFYLQQKINEKVNIMEEKPATFASKSYIYRKLKELTFTSILNRRSFKSLQEQVLQSINSKIPLVLGKKLGKLEPHLPALLKFITSIQSRIEDGTFTPAKYTDRRGYRFFSILPVYSFAMKSIQIDAQAFWRLLQQSGIENIPKGVKDKSALSDFYYRVRKKKQIDTLLGKQPEDFLEDIENGCEIWGVDPGIATLVTAVDTSGRQRTTSLDEYYHLCGYNDANSIRKKHQEQHKAQFLKVSNLSSLKTSDMAEFLKACKERLSLYDDITSYYNEKSWSSKLKFKCYMRKQKGVHEICKRFIHGSAKYDEKATTGKTIIAFGDGMFGSSLRGNKSAPVRMIKKALKKYCGKQLDICMVDEYLTSQICNKCKTRNVDNVVTAKSKRRVHTVLKCKQNNCNIIWNRDIMAAHNILDIFLFAAKNKNQRLDAFVR

SEQ ID NO: 3482 - protein, 460 aa, Rhizopus delemar
MASPKNHVKAFFRLAELSEAEYTKQFAYFTLRSTFIPCYMTLVSKIIHYHILKSKKNPKTGSKFETWGAVVDLNKKAFKHQRFQKSLQFQGTLETDRVGVSIIKQNTDTSRKPPNPNIEKKVDGNQTEHIEGLDQADLKSTEGKCVLIDPGKRNMMYCMKETNTIEEKQTLIFTKNNRSKCSRHFRYLRKRTQPLAVQKAEAILSRSESSSVNLRRFVQYIQTRASVKHTLYEYYGNETTKSKETYFPESEFDFRVDQKCNLYYGSLFIAKIRDFFPQPENYSTDSFVKSQPYATYLQIMLQQKHISERLDDSEKSKALGLAKEMYRQSQKSNYKKTISTALEKLQLLPFRKLKFSSKLFFDQNDQKLVRILRAMFGQDAVLVFGDWSASNVKYQESTRSKGLIRMLKRNGFVVYLINEYKTSSHCPACENELEKFKTVPNPRPYQRKKKPDVLCNGLLR

SEQ ID NO: 3483 - protein, 379 aa, Rhizopus delemar
MAIRHNSIHTVDTASAPPTTKKELKKASRGLVNSEACVLRNFEDFTFCGTDNGLVNMTAAVPFSLKRFSFHLKLHNYYSVLDDDNKAAPVVQDIELQKCLKTPKATIISANEIDFGCGAFKQRVKRQTGKKLTGKGKEVQLIENSLSQKVTSTSNVSVEQFKHNFDAHVEHRKKLREFYNTGNRMNERRHREIQKHRFTHRIYTKERKALSQTSGNNPSTKKKLVMFIGDRGTGVGSCIKGFKKYGGRWKEVIHSEAANACITNENLTSKTCIFCFRRLTHPRISVTKNRGIFSRKVKSSFYCTNPLCVSVLSKCAAKSRDSLSALAIGIVGLSTILFGAPLPAFKSHKISNNETEKYTILTSPSRFEEETGSYAVVLE

SEQ ID NO: 3484 - protein, 291 aa, Rhizopus delemar
MDRNVTDYKIEIIIDSFELYVEDNSDDDFQPVITARKRKSRENTPQSGSQKRLKDKGKAIGSEVTTRSSTGISTTDEPTVFNKITLKDNDLEYSSDDFDAPVIKRPFLGESTKSASRITKSTSAAQSNYKKIIGTPLEKLKILPFRKLKFSTKFGQDAVLVFGDWSAPDVKYQESTRSKGLIKMLKKNGFANYLINEYKTSSPCPTCENELEKFKTAPKPHPHQRKKKPYVLCNGLLRYKSLSCLKQQTTGIKRRFWNRDQAAVLDFLKTLNSLRKTGERPSLFTKKYSLD

SEQ ID NO: 3485 - protein, 708 aa, Rhizopus delemar
MAETRIKSLEEKFAQKQDASSSSREKSVESTTTIKEETTPCDDLSRGRISQLKSGAKHFIFSKDLVTEKDVNDEFPDATRKEVSVCLLIINSLKKFAPFTRKLCPAMSSAHVNALNIDAPSLFQIMKSKTGDNQGQVEGMSTELTIYGYNEEPLPSVEIARRNKDAVFNSLFDMEKVRHTCESNGLKFGQRMSVLPKLKVVRILGVKKTTVPLVKPQKMSYLKRILRDPNILREGQTPLEDLKAETAKLEKEVKSLDQERERALKYQKEQDSIKKIKALRKEWHNKVDKQILYQRIEEERHLRDKTYLKINDIEDQLMEKKQVLYYQRMAIRHNSRIHTIDTASAPPTTKKELKKASRGLVNSEACVLRDFEDFTFCGTDNGLVNMTAAVPFSLKRFSFHLKLHNYYSVLDDDNKAAPVVQVIEIQKYLKTPKATTISASEIDFGCGAFKQRIKRQTGKKLTRKGKEVQLIENSLSQKVRSTSNVSVEQFKRNFDAHVEHRKKLRDFYNTGNRMNERRHREIQKYRFTHRICTKERKALSQTSGNNPSTKKKLVMFIGDRGTGVGSCIKGFKRYGGQWKEVIHSEAANVCVTNENLTSRTCVFCFRRLTHPCISVTKNGELFSRKVKGSIYCTNPVCVSVLSKCAAKSRDSLSALAIGIVGLSTILFGAPLPAFKSHKISNIEAEKYTILTSPSRFEEETGSYAVVLE

SEQ ID NO: 3486 - protein, 411 aa, Rhizopus delemar
MKIVLLIINIYWLYITSTVASAAFYGLNYGINRDACPNLDKLDSDFKALSQYASHVRIYSVKDCDLGENALLAAQANGVKLYMGMWIDKTDSFLQELVSLKKLVSDYNVQNIEAIIVGSEVIYRGDVSSDQLTEYINQVKEVVHPLGIQVTTSDVYYKFEPNVVSAVDFIMMNAFPYWEGTNISEAPNTLFEHYMHVKSLSNGKVVRISETGWPEEGAVFGDSIPRSDYQKEKLRNNLKRDEVIVAELSLLHFKSSTVNKDRFVEHLQERVKVTSVMKAYYLTEDHSVEEEQCAGGFLSFRKMKLSSFINQQQADKRLAKKLREKFGKDTILILSNWLAGNVKHHEPMRDVGMRRMLAKDGLQVYLFDEFQTSSLCPSCRNGELETFKKVQNPRPYQREKHLIADHHGLLS

SEQ ID NO: 3487 - protein, 322 aa, Rhizopus delemar
MTAAVPFSLKRFSFHLKLHNYYSVLDDDNKAAPVVQDIELQKYLKTPKATTISTNEIDFDCNAFKQRVKRQTGKKLTRKGKDVQLIENSLSQKVTSTSNVSVEQFKHNFDAHVEHRKKLRDFYNTGNRMNERRHREIQKHKFTHRICTKERKAPSQTSDNPSTKKKLVVFIGDRGARVGSRIKGFKKYGGRWKEVIHSEAANVCVTNETLTSKTCIFCFRRLTHPRISVTKNGEAFSRKVKGSFYCTNPLCVSVLSKCAAKSRDSLSVLVIGIVGLSTILFGAPLPAFKSHKISNIEAEKYIILTSPSRFEEETGSYAVVLE

SEQ ID NO: 3488 - protein, 1081 aa, Mucor irregularis
MWSSLKEEALRKKNPTKARHKLGTTLDALVVRYIEEESNHMYESKWKKFKKVEKNKKKTVDDFKATLSMKEIPTGVVPVVKARVEQMLREGEVAGLSANDIPKSGAWLGKKVHTLKKQGKLSVEGLIYGFINILKNDQNNEDPVESQEYEDEPSVSEAIDEDENSYRTVSRSLKRTINHSFDYNTLNTRLDDLQDSCTRVIAGLSKSVHILINLIISGKICTDEGDERKFFKLNDIDLNANGIGKDESDIYLPSKEVLKNIETHDLFSFRGFWMILSTCVGEKSVKKKGNIVLNAIISELEDSDKHDFTTTPAIQHACKQFYTNFCNMWTKESYKQDLRVAVTLLLRINLAKKRFFKPKRKNKGKVAESVTRILVSKNKNSKKDMEALFELLMEFQGGKHRKFHCIQKVLKKIFNAQDVVHANTESSKELRDHEDQELSDGDEDFLNDKELLVPDNETDDVDLTGREINALVSVVVMLCGSESIIGKISPEYIQKQLYTDKKETIPFGALATCAKIVNTLRSITLKENDEASFMNCYPVCHLRNVLARFAGPKTRFNDRKMCPILNDSKKSSVFVTPATLYLLFCKDHNMFDSQNNPFTSYSSIKSDIDKQSLFRNFFDSSTVDRILKEQKLKPCYSFYYSNRYDIKFLGTKAVVKTNKEEVVEVPGIGIKGDEDKDLTSDDKKQLRARINELNILVKNGKKEYSALIKELRPAEDLRMNVARSFRAKMKNNPNWDADSYLELKRARTTCDNIYNKLSSLNVRVKDAQHQMYSMNKKLHSQATISNQLDTLQIPEDVASNLSKGRTLIQGLDPGIVTTAAINCIKPQTLFESINRFEVLNITSMDAPKHLPVKEVVFDFSAKRVDNAVLSQAHRLEREEKQRKNKRLDIKNLQKRATTRKIRLGRYYKKSLSHDRDEAFRLQNVEKENGSLLTFVGNWSGCSPFLRGHSRRSLKPIVERLAAVEGDHVFTIDEFRSTVTCNSCFQLTTKQVVRVGEEKKKKRVKGAVTCTNKNCPRRKTTRATTTNRDQNGAKNIALIGFSRMVSEDGLCLPPFRRKNKSNKYNLSQTYSVHQTGNTRISC

SEQ ID NO: 3489 - protein, 208 aa, Mucor irregularis
MKTRQGKRLPSASIPLYKTLASGFDLDARVHKVDKSLDDLTRQKRYYLKKKEQVAARAVFTIVVKTAEGSQRTLQASIHCGNRPLQSAVVMRLMSHIFAFGAAQFGTLRGNVPAPTKALKKALNHFIKLPPILTQGLHLYNRRFLVMVDEYLTSQICPRCQTRTVARARDPVNNRSILSVLNCEACGVHALEQGPYGQSFGFNPYGVK

SEQ ID NO: 3490 - protein, 560 aa, Mucor irregularis
MHKTLHYDNKQISSKDKATAAKDAVFGSFFDLVKINNVFEKYKLDFGHRLTLLPDMKTVRLMGTKKNIPVVITDEQGHINQTVAVKHTKAEKTMDLRKKYTIEIEALKLQRENTLTARKNFTKDQLIRCNKKLWGCATSEESRREHYLAVQKAKKERDLLMEKVYDIDIKISDINQKRSSVFQQYIPTTRRTLQPHKFLCLLDAGKVLLKPEIINNEIRFSGTDNGVISMTETTSFDIEKFDFHVKLFYLYSTLQADGEVYFEEEKKMISVPKPFVVKSETVKNSSGGYTRDRLLREKKSGSEEGKQVSRNESQLQQFSVAKSTSMVDLVASYDANKSCQHLLRSFYYSKLMLKQKRRADIDNGVISMTETTSFDIEKFDFHVKLFYLYSTLQADGEVYFEEEKKMISVPKPFVVKSETVKNSSGGYTRDRLLREKKSGSEEGKQVSRNESQLQQFSVAKSTSMVDLVASYDANKSCQHLLRSFYYSKLMLKQKRRADIGIKGAKDRICAMERNATGGFSPPIMFVGDRGYGQAIKGHLKYGGTWKQTIHSRYTSVFVTN

SEQ ID NO: 3491 - protein, 793 aa, Mucor irregularis
MPNKVINAKRVIIVSKKRDVIKKWEAEGDTVDDDDRFKDIFCVDCEEQGHASKNHFKCPFYKEASASDGEYLTFGTSKKRKQSFAVKAEKQNAKRQAVASTSSSSSTVKCKSCKEVGHGSSNSKNCKNHNPTKKEVLLTNLGENYQAFNRKTPFDTLVKQEFKTNLRNKILESSRYIRQIMIRAMMFTNFYMINNVDDATNSIFQQNYWYSVCQLVNGRKVTNGKMTSPAMMTKWTSFKNTYANAVYNPNLPTGASSCLSSACVEAATIYTNHIVENFEIRLLKFLKYRLQNKFAKIAIIAEKYCYQYICGGSPKWDDSFELSDENKKEVEDLCAHLKSFLPMEATLVTLSKHTEKFLPLLSYIISFYETEHKEHKPYDVRRTPLPRLFGLFPSPSLHFRSITVNCDTLCAFIKKPRSNTFAGQLETFQKVIDFYKLRFKDTDLKPNENNKVLFGNLIRSNGLKLKITDFALEEVKQHYEPIFIDPRRTSIFTGAKGLDIKNHSLLRCSTKEYYHYTGSTKFSVAQNKLKQERGIDKIESAIPTPKTVNLESYKHYCEYLFANLDALLDFYSYKTTKDRFFLYQGRQRAPALMTNMLVDGGLKYNRSEEYKKKQVKRKEKKNKNKQEANKKAYKKKRKKKDSNPQGRSPQNRVQADNKKLDRWRPLPYHLDESRVPLIVFGDGMFGKDRVKLKGHRNGVVEKLYRTLKSKEAEGQLIVVTIVEYKTSKTCSLCFHDDVRIISSKTFRGVGVVSCSQCSKLWQRDSNAANNMMTISKSIWSGQGRPSVFTPKEN

SEQ ID NO: 3492 - protein, 655 aa, Mucor irregularis
MSKDPGSEKKKLEKRISTIKTSIQNIEWKKDYKENLHELVLKVNLLVTHAYAFSKYIFIKELETDPTFDLNSSISSKFFTEVFITLTNTKQLVNRVNPETAIIRTLLWKHREDYLRHSKFRPPSFSYAQQNALYEAQKIFTAYTNNISGNFGNILRKFINKLLRKEERVKELKLRMEKSNYSKKQIDNMIRTTITNVCTKVKLSISKKDINQIPKDFLTEDKLKLLQEFISAYPLNYQFDKDSIYYDVKSRPENHFKPFFVLSKLCELHDISVPVCFPLRKTNIPCHITIDTKILKEQIIKAPKSVQGARTKSILVKFQGMILTDGISVSIIKQNFEPGKGSLGGKSSVDKVEETSTYVEDVDISNTEGKCVLIDPGRRDLMFCIHENSTPTNPQMLRYTQNTRAYETKSRHYRKIRQSLKPDEIETLELELSKVPSSTVNVSKYETYLQTRGRVDELLKRYYSCESQAAYDAFRFEDYGVSLKVDENCCLVFQAQHKSNSRKRNAMTITYIKGYYPRNRNNDHNDSAYNLGLALMEPHFTNRMTEEDKVEAQMLVEKFYDKSLSLKEFEDLSSLILKKLLLIPFRKLRFSTYVNGRKSDQLLVKNMQTKFNQDAILIYGNWSAGNSKYHEPTNIKPPLSAHSASVQTENVWSQT

SEQ ID NO: 3493 - protein, 678 aa, Mucor irregularis
MYKSLILNKIEQVRTVGTSGKRQSFQVKQDKRDAKKQRVDIDQNATCASCKRRGHKSSRSPKCPDHKASKLEVMADNLGEGFQMFTRKIPLDNCVKEQYKSVLKNRILSASEDVRQLLFRAQLFNFWYFMCQLINNKRITNSKDIPSGLLDDWNNFRRQHPAVLYPIQLASGNSQCVTEACIQVATTYLNAIVETFEKRVLSYLYYLIQNICVSMKPEQVKLIVEEYCYQYVCRGEPKWPTSIDLSEENKLRIIDHCNTLRNLSDESISLKSLSASPGNYVRWFSYILSVYEEDHRAHSLYDVRRLPLPKRFSITPVPSFRCKFVTVSANALSSFIKGTRPTGYEGQLELFYRVFDFTKLRFKDISELKPGGDNTVLFNNIVRSDGFAVDFVFCRKKQESVIGAHDLRLDDFSYDEIESVYRPAFIDPGRKSVFTAAVGLGDNHQVRRCSTKEYYDLTGSTKYAIKLQKLKNEAGITPIETNTPTAKTCLASVYDTYVTYMLLHRQVLFNFYGYQKAKDRFYLYQGRQKAPQIMNMVIPQTVAKKKWRPAKFEQDMRKVPLIIFGDGMFGKDSVKLKGNRTGVTGVLWRAIKKREREGDLLAITIDEFKTSRICYKCYDDSLEKVDNVRGVGVLGCKNCQTLWQRDVNAAKNMQLISSYIWNGLDRPIMFCRRSTATS

SEQ ID NO: 3494 - protein, 1039 aa, Mucor irregularis
ISELTPNGSNEVLFGNIVRTDGFAVDFLFYKRNQVGSGSDLNNFDLALEDFTYNEVAQDYHPIFVDPGRKSVFTAVSGLDEAHHPVLRCTTKEYYHLTGSTNFSIEQNKMKARLGITAIESAIPTAKATNPGHFEEYARYMFENLDTLFSFYNSKTANKRFRLYQGRQRATEAMVNYLTNGGDKYNRGRRPKVKKKRKKNRRRPAAHNEPSAKDKWKPCKFQYDKKKVPLIVFGNGMFNKDTAKIKTLKHGATGVLWRALKKREAARQLIAVTVDEFRTSRVCSKCKTLTLANFSPASRASVLSCASCRTLWQRDVNASRNMMFISLCLWQGQERPAPFLRSNATTTTAISTTSTIATPPPLTSSQQYTRMSDLRSRTNNKKVKKAETPKSAPANPGAASSDLNAVNAAQALLNESGTATLSLVSAFRILFIMRCFSALYRILDDCDEVYNYWEPTHYLLQGYGRETWEYSTDYKIRSWAYIFVHAIVGVLTSIITSTKLQTFYLIRMALGAACSYVEARFYRTVTEEINPHVGRYVFAILFFAAGMFNASTAFLPSSFAMYCVFMAFSYALRPVSDIDYSRTYKVVFWIGLGALGGWPFAALVGVPFAIEEVVVFGRDTMTEKDGTVVRSVAGSNWRLRRVIRLIEASLIVGSGIVFLLVLMDQMFYRQYTIVAWNIIKYNIFAGAEGRGPELYGTEPWYYYILNGVLNFNIVFILALGSAVCVLITAYIDRNRVPGSTKMDAVWPYVVLGLKLIPFYIWFLVFTLQAHKEERFMYVAYPLVALNAAISIFLVRSWASRFAGVMGANVNVRVIVLRYTSVAILSVFALLSASRIIAILTRYRAPFVVYSSIWREQAPDQLVNRNYIQEDFPDNVDLKIKNVCIGKEWHRFPSQFFLPSDTRIQFLKSNFDGQLPQTFEEDFAIDSYLGPNGVPVQYRRRLYGWLGARTAPAGFNDLNLENPNVYVREEECDYLVDVDFPLRAQSPLEPSYIRDTKNWEIMDCHPYLDAENSHRLLRAFWIPGNAGLQWGEYCMLKRKN

SEQ ID NO: 3495 - protein, 1833 aa, Mucor irregularis
MKRRLTEQGVRDLTRRKRDSQPENTPLNLDPLQFQCDTKVPVASSADNPASVASYQSAVDNYERSFSESLSETKSYLKRFKIQVWNAKLSAKHTLSATYLIHVLNKKVESNIKMTSNMHPNVAVTPKDDLLVFAFCQIYKCRIFLFSSRAKPEIVTPKDNHNSAAIPSFAVLKHCNSFIGKTTWYELKFNNNLKDRSRVDETLATEDTLFAQKRGVGESKPKLKGHTLGSSVDGQILQLLREEVFSIFDKRWLAFVKKHTNLTNEETISSFLSTLPAKSLPNGVVPIVKAKIEKMLRDNEIPGSVPQSPMWVHKRIDTMKKKNEVSIEGFINDFATNLDVSKVRPPIQVAEHADQDADGNTGEDAAGEVSEDFEVDKDDFRVVGRTLKRVINSHVPYDEVIEKFDSLQANCEEVITGLSKAVKILTAMVLSGDKSITNGADASLFNLNKLDLHKNNIFLGKEKIAILDDTSIKYIEKSNIFHYGQFWNIMSTCVGEKSSQKDKHPIINAIKNKMKKEDIVKFTTTPALASACKSYHTNVTNMWTADRVQSDLRVVIILLLRIHLAPKRFFRQKSKKKSLESINQNNVVNASASNCKIGKTKAMRDLFHLLQRHNGDNFGNKLQVLQKLVDIIMKEKVKIPSAQKVEETSPVDVVDDLEKDVSDDEDEEDIYLVKDDFEDLTSGEIKALTSVSLMLVQSNSITGKINEMYIQKQLYGDKRESIPLRGLQICAEIINALREIVPVKGSAYSLANCCQVRHVRNLLVEFSGTKTRFRQHRLTAEKNQSNSSKMGILINHVTLYLLFQKEYNMYKEDGSSFTAYQSIKTWEDKKAIFSNFFKFDVINKIMAERQLAFKFSFLFKDRYSLHFLGQLDDLVAEEPNKSTSTAEISPPTKTAGGVKEEIDALVAEVKKNSSLLKELRKELKEAEVKRMDLANTFRKQEKSSWDQDMYNELKSQRNACNTLYSDIDRLSSAIKNARMKMYELNKGLYSQKQPVTQIRPTADRNRMVQKLKEGNVIVQGMDPGIVTTAAVNSRSSKLLFESLNRFAALQSNEEPVNLTTPSTDNKQVAFSLTAGLVNSANFSTIHRMKREHRKLQGMDPGIVTTAAVNSRSSKLLFESLNRFAALQSNGEPVNLTTPSTDNKQVAFSLTAGLVNSANFSTIYRMKREHRKRKGLELDHTYLAKRTLTRKIRTNKAYQHIYATQRDGLYKQLNLNKKTTPVCVFLGNWHQQSTYIKGHSRRSLKPYLSRVNSYKFDYFEVVDEYNSTLKCNSCYRSTMKQAIRTGHLTRRIKGAVVCMNKDCPKRKSDRSTTCNRDQNGAMNIAMIGFSALVSQDGLALPPFRRGFYAELDDVLNQPYSSEEDVQRITSHYIRFLSRYQQDFLQSAVEFAQVAYKLIDSKVCLDFSTVVLGHILNKHALKSNNTTELLVSYSLLLYAGKDEPRWMDFILLESIRNRKNRLFCKIMTEVRQAKVETNDLNLLDTTLVNHFLDLVEETRGDSDESFNYDVIRLVMVINEQYMMSGLDVNLVLDVLSERMGSSDTFSANLIFMLNRSNDTCVQMLILKLLYGVFTTPKLYEYFYTNDLYVLVDISLRELCDLGDTKEAQTLRDAYLRVMEPLLENTQLRLRPYKKHETYKVFQSLLNPGMQRKVNSTTKRLVKRIIENWWEGVCGGFYKENNHSSPNLTHTLSSCSSSSENCPSTPDAVDEIAAVIPRKDVEKKLLEQEQHNNPKGIVIVRKRRLGSATTYARQSRFGKNNCYNWWEGVCGGFYKENNHSSPNLTHTLSSCSSSSENCPSTPDAVDEIAAVIPRKDVEKKLLEQEQHNNPKGIVIV

SEQ ID NO: 3496 - protein, 635 aa, Mucor irregularis
MLLYDPSCTASLLKDRLYEATEKEIATIKLLFKFFKPYIPQKEDRLSIDYAKFVRKLFPVPKFSRLHALEVNSTALYQILTARPSPLKIADFDHFEIESTDFARSNVAAVMNSIFDLNVVNQVCESHRLVFADRIMVMPGLKTARLLGTRKDIKNSLEEPSAPSLVDRILTNTSIVEEAKKEFNVLKREVDTLETNLKTLQNDLKVLLKKNEPLELSAKIKEKKKERNNCEDQGLRGEMLAEIVLLKNKRFEEYRKIQASQKAVSDAKQSLHFRRMAMRYHHRLRRSAPATTDPEERPELSKNTIGLFKATECKIKKPADFVFSGTDNGLVNMSTTTPFTLDRFKFHLELYNRYQVLSEENVEIDESDDEVEQFFKLPKPSVINAADVDIGCGYRKVRLKLEREKKSSTSGKAVSDAEKELSKKPLNVNLTIPEYLENKEVHVGQSATIRPFYGSAKRATKSRTVEIQKQKFTNRLVSKEKESIKRAVGKRKIVQFVGDRGTGVGSRIKGFRKYGGKWLEVLRSYQNIVCITNEHNTSQLCIYCFEKVCHPRSSNKKISKGALQCVNPGCVSVKAGKAIKSRDALSSLAIGLSGLCSCLLGVTMPHFSPNKISQFDTDNFKNISLAFVKEEQERQ

SEQ ID NO: 3497 - protein, 278 aa, Mucor irregularis
QIRPTADRNRMVQKLKEGNVIVQGMDPGIVTTAAVNSRSSKLLFESLNRFAALQSNEEPVNRTTPSTDNKQVAFSLTAGLVNSANFSTIHRMKREHRKRKGLELDHTYLAKRTLTRKIRTNKAYQHIYTTQRDGLYKQLNLNKKTTPVCVFLGNWHQQSTYIKGHSRRSLKPYLSRVNSYKSDYFEVVDEYNSTLKCNSCYRTTIKQAIRTGHQTRRIKGAVVCVNNDCRRRKFNRSTTCNRDQNGAMNIAMIGFSALVSQDGLALPPFRRGYNNSNK

SEQ ID NO: 3498 - protein, 972 aa, Mucor irregularis
MQANREANIRHTTIVKVNSSVVESSITLSSSDDDFQPVTSSTRKRKSKENTSVAESFKKLKGTEKTSHAQITIDDYDLVESSEDSLFEFIFDKPALHDSRNLRAESSKSAAVGSSQGLKQISMNTSESSNSDSSKSKPVSNTPNTTAASPEPGSSHDPIDETSGDATKNSEETVDRVITVKATISSIWNKQYLEPLYDLVNTTNLVSVYVSHAQITIDDYDLVESTESSKSAAVGSSQGLKQISMNTSESSNSDSSKSKPVSNTPNTTAASPEPGSSHDPIDETSGDATKNSEETVDRVITVKATISSIWNKQYLEPLYDLVNTTNLVVTHTFAFAKYIFLKEIEADENFSMKEYVSRDFFVEVFLSLIIGGGSKPAKIKDVTREYRQVISKHKNSYCECAQYVPPKLLYAQQIALYECTKIHTAYHNNIKAHFGSRLRNILNKLFKKKEKMEDIRGRMNATNATKEEINKALRDQVYKPCDQMKLSVSRKEMPPVSLLDIQSIHQLKAFFSCYPDDYIFQKDPIYYDVKIKPEYHFKAFFKMAEMLETQKNETFACFPLRTTFIPCYMTIDSKIVHHHILNNKTQLKAESKYETWGTVVNLRKKAFKSQGPKKSLQFRGTMETDGVGVSVIKQNMDTNRKILRKRNVQLATNDTFKYIEELGQDVLKKTEGKCVLVDPGRRDLLFCMKESSEPSDKKIIIHRKINRNKIARHFKHLRQKTKPESIKIAEASLSKFTPHSVNITVFTNYIKEKASVEDLLRGYYGNETHITNETYFPDVCTEFTVSNKGDLYFGHLFVTRIANSATILDQTYASYLNILLEQPHIKSRLKNEDIIQAKQIISRMTMTDEGELLKKEISCLLKRLQLLPFRKMKFSSKIYYDQNDQELVKKIKNKFGQESVIILGNWSAPHVKFQEPTKNKGFIKLLKKNGFEVYLMDEFRTSSHCLINDEANPASSVTGYSGVQTLPVIKKK

SEQ ID NO: 3499 - protein, 486 aa, Mucor irregularis
MFDMNNNPFTSYQGIQSDEQKEALFSNFFNWKKIQRITKEQKLKPSFLISFNNQYDLQLYGKKPAPQEQEGSNEATRQKEPPTKVSQLEIKSLNEKIKVDRTEYRQLVAKLKIEEANRMDLGREFRTKEKKEKIWDVALYRKLKNKRNDCNEIYDKMQELNRRIKRNQCQMYLMNKSRAGQEVKVDENEFATSTKILSEIRKGNVLVQGIDPGIVTTASVNCTKSSTLFNSINRFQCLEDGETELVHQHDEEDLKNFRYDITARRVNQIVLSTHHRLQRERKQKLSESIEKKNLEKKTVTRKIRLKRYYKKYISSNRNLMFQHFQTRKEKGSLITFLGNWSRVGSYIKGHTRRSLGPVMNRLKSVEKDSVYTTDEFRSTVTCNSCFSITTKQLMRVGDNRTRRIKGAVVCSNKHCPRRIKSNSTTVNRDQNGAINIALIGFSKIVSVDGQALPPFRRNYKSSKYTLLNNFIGTRMVTAASPPAGGN

SEQ ID NO: 3500 - protein, 594 aa, Mucor irregularis
MADTNIGIPAGLITAWDDFRSRHPNAQVQISLLPGASQCISEACTEIETLYNNNVVETFEMKLEKFLRYKIQMALPYIDDKSLISSLSHNYCYQFICQGDPVWPENSLVNDEVKAVVESICVPLRQTLNKKVTLKELARSPSTFVKFLLHINTQFEREIELHNASDVRRLPLPKLFNVLPSPTTHWRFITISMNALSSFARKPLTQGYQNQLQLFYEVFNFKKLRYNNISELTPNGSNEVLFGNIVRTDGFAVDFLFYKRDQVGSGSDLNNFDLALEDFTYNEVAQDYHPIFVDPGRKSVFTAVSGLDETRHPVLRCTTKEYYHLTGSTNFSIEQNKMKARLGITSIESAIPTAKATNPGHFEEYARYMFENLDTLFSFYNSKTANKRFRLYQGRQRAAEAMVNYLTNGGDKYNRGRRPKVKIKRKKNRRRLAAHNEPSAKDKWKPCKFQYDKKRVPPIVFGNGMFNKDTAKIKTLKHGATGVLWRALKKREAARQLIAVTVDEFRTSRVCSKCRTLTLANFSPASRASVLSCASCHTLWQRDVNASRNMMFISLCLWQGQERPAPFLRSNATTTTAISTTSTIATLPPLTSSQ

SEQ ID NO: 3501 - protein, 464 aa, Mucor irregularis
MAHRFIEFDNLRLNEAREYLYPRVQLDLLHATLANSYGVDIMTTDEAFRNLFRLRVNQIDGLYGDQGEVHAVALRNFFRAQFDRWRNTFANTKLEVITDFSYATPARVATILQFYAALLNDIGLHNLNVKRWSLIPIATHQMENEVNRDRPYQLAYGFKTDGHMISMHFYKDLQGRPPIPFDMGELRTMARKIDVSRWENGMVELIKEPIGLPNDCRIVGVDPGVRDLLCAVERVNVEGQEVNRKAFSISNAEYQVRSGRQWAQMKELQSREHAHIQEVYDLIASPKVHTITDFSLYVRSISQTHNRIFDFNRSYRHREIKGYLYSAKKITLDYIADNIIGLYPLRVDNKTYSKVMLPHKSTKKERRRARKQFRNEITAFRPPTQRTIVAFGDASINSSMKGHPPIPHQQQQRAIARKALLVRVDEYNTSQTCNVCHSHLENVYARENVCFEHRYQDTNFHYYP

SEQ ID NO: 3502 - protein, 375 aa, Mucor irregularis
MKQQKTLLNLANWTKGLYPLYKNPFGITLEDRIIGIDPGIRDIVCGVDCDHDGLTNKQSTKVHSFSVSNASYSIRSGMQWLKQKELRNRAVSNIQTSYDRLKSRKTCTNEGVMQYLNSLASERTRIHDFMKSYCHRENKGYAFSDRKMAQDYVARVVLGRTVVGEDYKLAHNSSSGSRRERRMLFRLNHLDDIRPYDDTRRTVVAYGDASIQGTYRKNTPIPVKQVQRAIAEKAVVLTVDEFRTSVTCCHCYGRLENVLQTVHVCNHRKKRHRSTGVGENVAERRSTMKCYDNENHILHRTSACPERRPFDNRVNYPLKLCPQCPVNNNNRLFWNRDVNAAANIRSILVNYINQGFNLQSRPAALSRGHQDQGVL

SEQ ID NO: 3503 - protein, 866 aa, Mucor irregularis
MILSTCVGEKSVKKKGNIILNTIISELEDSDKHDFTTTPAIQHACKQFYTNFCNMWTKESYKQDLRVAVTLLLRINLAKKRFFKPKRKSKGKEAESVTHTLASKNKNSKKDMEALFELLMEFQGGKHRKFHCIQKVLKKIFNAQDVVHANTESSKELRDHEDEVPSDGDEDFLNDKELLVPDNETDDIDLTGREINALVSVVVMLCGSESIIGKISPEYIQKQLYTDKKETIPFGALATCAKIVNTLRSITLKENDEASFMNCYPVCHLRNVLARFAGPKTRFNDRKMCPILNDSKKSSVFVTPATLYLLFCKDHNMFDSQNNPFTSYSSIKSDIDKQSLFRNFFDSSTVDRILKEQKLKPCYSFYYSNRYDIKFLGTKAVVKTNKEEVVEVPGIGIKGDEDKDLTSDDKKQLRARINELNILVKNDPVESQEYEDEPSVSEGPPPFIYYSFLGTKAVVKTNKEEVVEVPGIGIKGDEDKDLTSDDKKQLRARINELNILVKNGKKEYSALIKELRPAEDLRMNAARSFRAKMKNNPNWDADSYLELKGARATCDNIYNKLSSLNVRVKDAQHQMYSMNKKLHSQATISNQHDTLQIPEDVASNLSKGRTLIQGLDPGIVTTAAINCIKPQTLFESINRFEVLNIRSMDAPKHLPVIEVAFDFSAKRVDNAVLSQAHRLEREEKQRKNKRLDIKNLQKRATTRKIRLGRYYKKSLSHDRDEAFRLQNVEKENGSLLTFVGNWSGCSPFLRGHSRRSLKPIVERLASVEGDHVFTIDEFRSTVTCNSCFHLTTKQVVRVGEEKKKKRVKGAVTCTNKNCPRRKSTRATTTNRDQNGAKNIALIGFSKMVSEDGLCLPPFRRKNKSNK

SEQ ID NO: 3504 - protein, 774 aa, Mucor irregularis
MSVKAPIHKVFKPEFIQPTIKLAETVNDITTHTYSFLKYIFIKEVKDDRNFELSSFLNKSFFIEVFLSLVERQVRDGVRSGSGNSSIKETTTTYRNLILKHKEKYCRYSGYVPPKLTHAKQNADYECTKINTAYINNIKAHFGDRLKQVVNIICGKQNKIRELEEKMKAARYTAEAIKGLIKNTVITPCANVKISVSKKQVPSDNFLGEKEKAFIRRILFSYPQDYTFMKDSIYYDVKVNPLNHYKAFIQLEEIIEELTYDKEKQTCKSFVVYPLRTSFIPAHVTMDTTIMNYHILGAKSYKEEKSNIWPKIMNMDYKALKKQKTDKSLCFHGMIQTDGVTVTVLKQNFETGRRQQSRNSKPADDDDGFTYIESMTKEQLEQTKEKCVLVDPGRRDILYCMKESSTPKNRQCFRFTKNTRSKKSRRFRYLRNQLKPDSIKSAEGQLSKFRSNTLDPDKFIEYLEARRDVGTQLKVYYSNETYDETPDYYPEPLDFVVGRKGDIYYGRRLLFIKRVENARRGVADLHSYLRYLAMLMSSKHLVKRLTRQDTDNLSRIISDTTKCLDEDQLSPEEVNTKHREVKQQVHKIVSKLLLLPFRRMKFTSKIYYDNCDMTLAKDLKEKFGNDFILIIGDWSAPTQKFHEPTRNKGLLKFLKKSGFPIYLIDEYKTSTCCPFCFSSNLEKFKEVQNPRPYQREKHPLVKCHGLLRCKSESCLAIGKRRIMNRDTAAVLNFRLILNSLREEGSRPPRFCRSAPKRQLTDEGGSQRKSQRRKQ

SEQ ID NO: 3505 - protein, 552 aa, Mucor irregularis
MAHRFIEFDNLRLNEAREYLYPRVQLDLLHATLANSYGVDIMTNIKLHLTRNIPVYQKRILKGFFMRYKIDNGLENFNPGQLADEAFRNLFRLRVNQIDGLYGDQGEVHAVALRNFFRAQFNRWRTTFANTKLEVITDFSYATPARVATILQFYAALLNDIGLHNLNVKRWSLSVLRVNQIDGLYGDQGEVHAVALRNFFRAQFNRWRTTFANTKLEVITDFSYATPARVATILQFYAALLNDIGLHNLNVKRWSLIPIATHQMVHVNFSGPVIVYILLQRLRNRGPLPDIELQHETGILRFNQGTTRAEFLRHYRIPEFKEHLWQQIFRLDKLVKNRRLENEVNRDRPYQLAYGFKTDGHMISMHFYKDMQGRPPIPFDMGELRTMARNLDVSHWENGMVELIKEPIGLPNDCRIVGVDPGVRDLLCAVERVNVEGQEVNRKAFSISNAEYQVRSVSMHFYKDMQGRLGVDPGVRDLLCAVERVNVEGQEVNRKAFSISNAEYQVRSGRQWAQMKELQSREHAHIQEVYDLIASPKVHTITDFSLYNLRLQ

SEQ ID NO: 3506 - protein, 2177 aa, Mucor irregularis
MTRKRKQETGDEKGPQKKKGKEKDLTSTGLIPPVDDDDDDFQTPMPMPLPRQHPRIGTSSRPTAEVSGTSSGSSRSAQLETLPSILPAEADASIDEEFAISLHAPPIISSRFTPETYEEERAFQIAIQESRQQALQSSTPGESSTSARARPAEPFQDVPVPTYGDAPQPRIRFAVPDRPVRRSNNGSSTSSMSVTFATPETPSSFSRRSSTTSITGNLQDIAVRSDTGSIPSGTESSEETAPTAEGTPAQTAEATPASTGKAAKRKARAEALKKAREEDARNKIKGTSKESSKRAQKAQRDRVKEKYTIKSSVATMIRPPTDTLSMFLNDDQRNAFVTHLRRAVEHVRDVSYAVSLLVNWHCLYKIENNQPIPRLSQNYLYHFASLIVGLGRSADPDVRNSYNTFTAQMGPAFDQTRQFENLRYSTLLSSVMRSYEVMINNHVGLNFEKRTLRYLFTRFSSTGDQFYLQLPVGVTRNLAQRAYTAIASRAEMTYPDDLEITDAQRNSIRALIAECLARLGDLPLNEENVYANAHLYLPFLHHVLQRMEENISIMNPVPDVTASIAYVHRRMYDLVANYSTLRRRFRSALEHHVRDAINSAEPTETFLTRPLPVVTGRNRNSLDRRQRRQDTLTVAQRIRIQEFVQNTRDSIAARTFRPERYTDPRGARLFTLLPVYSMQMRYIPMTEQALNRILRLSGALTGGVTDMVQLCWRLFRMNLLGFDTVRQLTGNDESKAFTGAFRTDGVAIDFIFDRPKQRPAEALAPADVARLVDLNEATIWGVDPGQKDVFVASDGDSSNTHRIRRTSTSEYYFMAGYKAANIKRAKYAANNIELRQLISAAGSLKTASRNNLEETLRTTFRNFLQVRNFYNFGQRSLRFTLYNKRRRALTELCKRLLTGSEKYTNLPPIQQSNALKWKPVTPSDQRHEQQRPIIIAFGAAQFGALRGNIPAPTKALKEALNHFVKTPPLHTQGPHPYDRRFLVMVDEYLTSQICPLCQTRTVANVRDALNNRSVHSVLNCQTCGTHWNRDHLASMNIRSVFLHMANNQNERPPPFQRSISTMFGKGIHRAAKLSSRNPIEMIAGILILSSFSYFYLFNLARNSDIFSGTVTRLYPTFVYADKNSDGFQQLTRNAMTLNNGKEEVASNAIKIQLKQVSIVDKENNLLDKDTLQSILNFEHTIQRTLLEDHMGSHFGYNALCFKNEQGECFSQAVSDIVDWDHLATTDLHKAINAHPELAQAIFGNLNLNATTASSLLLSYAFNASTAYRQELSHVWEQKVATLSSGGNLVSLSDSGNQEDVFTWMFIITRNIVFRIKELIEMADNIDIIVILAGYVMMITTFVSLFMNMRSMGSRYTLATAIVVNGFFSFMFALLTVNALGVDVYPVVLAEAIPFLAVTIGFERHFKLTKRVFEFSKETPLTKQEIRKTIVRAVDSVAPSISRDCIMEITVLALGAKSGISGLREFCLLSAILLAYDFISMFTWYTAVLALKLELLRIREINGTTSAKKGSVTTSKTTGTSYIRSTVVKAFSDTTASNNRNVKHDEPIIGRVKLLMIVGFVAMQLFKVCTTFQGSSGPQVSISEPGVSNVLEKLLQQHRASNAGHLPLLVEVFPPLPFHVASSVSSSFIPESIRKPLDYLLETYAVYIQHPVISKWITLALFVSLFLNTYLFKVAKEPTKVAPAAAAAAAAPVAAVAPVAVEQPVVVAAKKQVVVQEKKHRQHHQHHHHGAMRTLEECMALTQTPDALSDEEVILLVQKGKMASYALEKVLGDLERAVSIRRALISRASITQTLETSLLPLHNYHYDKVMGACCENVIGYMPIPVGVAGPMNIDGDMIHIPMATTEGCLIASTARGCKAINLGGGASTIITADGMTRGPCVEFPSIIGAAACKKFIEEEGAEIITAAFNSTSRFARLRKLKVALAGKLVFIRFSTTTGDAMGMNMISKGCEKALSVLSEHFPDMQIISLSGNYCTDKKPAAINWIEGRGKSVVTEAVIPGHVVEKVLKTSVSALVELNISKNLIGSAMAGSVGGFNAHAANILTAVYLATGQDPAQNVESSNCITLMKAVNDGQDLHISCSMPSIEVGTIGGGTILPPQQSMLDMLGVRGPHPTEPGKNAQRLARIICASVMAGELSLCAALAAGHLVKAHMAHNRNTAAPAPAAVAAAPVPGSCIKS

SEQ ID NO: 3507 - protein, 553 aa, Mucor irregularis
NESTATEQNEVVSDVRTPTKLIVYGYSQKPIYSIQESRQHKDATFNSFFDMSSITRKCASYKLKFAHGITCLPGLKVARILGTRLKKKARVEEPVKLTQEQRVIRDQSIIMEAKNSSENLRSRSVDVQNNIKKLELELKNALKTNQDVECSAKIKELKNEWKDSSNDDHYLNVNSMKTKLSKNRRLLYNIQMAIRYKSKLEVAEVPPAITRNNIEVDGKGISKAESRKMNSPEDFVYAGTDNGLVKMTASTPFDHEREDEEPKFTEEDNKFLNLPPAITTSAADVDLGCGHLLNRQYLERKKKSAEGRIIKQIEAVISEDNKTIPASTQEQLSKFKQHLTFREQLRDFYNAKKLLNKKRHTKVQKAHFCAALCREERSQLRKASGLSKTKKLLLFIGDRGTGVGSRIKGFRRYGGTWKEKVHGDAVNVIITNENKTSQTCIYCYEKLINPKVKKMVSANGENKAVYRTRKGTFICTNPLCFSVIKQRACKSRDALSAMAIGIVGFCTVKFGVSPPPFNIISNSNTESFNKLTFSFLNASEDRQLRCSSGVDCP

SEQ ID NO: 3508 - protein, 475 aa, Mucor irregularis
MIRTTITSVCTKVKLAISKKDINQIPKDFLTEDKLKLLQEFISAYPLNYQFDKDSIYYDVKSRPENHFKPFFVLSKLCECHDISVPVCFPLRKTNIPCHITIDTKILKEQIIKAPKSKDNKMEAWARVVNLGCKAFKEQGQKSTLVKFQGMILTDGISVSIIKQNFEPGKGSLGGKSSVDRVGETSTYVEDVDISNTEGKCVLIDPGRRDLMFCIHESSTPTNPQMLRYTQNTRAYETKSRHYRKIRQSLKPDEIETLELELSKVPSSTVNVSKYETYLQTRGRVDELLKRYYSCESQAAYDAFRFEDYGVSLKVDENCCLVFLAQHKSNSRKRNAMTITYIKGYYPRNRNNDDNDSAYNLGLALMEPHFTNRMTEEDKVEAQMLVEKFYDKSLSLEEFEDLSSLILKKLLLIPFRKLRFSTYVNGRKSDQLLVKNMQTKFNQDAILIYGNWSAGNSKYHEPVQNFYSSYSAGAD

SEQ ID NO: 3509 - protein, 937 aa, Mucor irregularis
MFRSYQFVVDGVNNISFRQTPGFDLKSIMPSSTNDLESCFTVQPLDDRLLETASLFNDFSQLFTSQHFGVLFSHFFGSRGVNALHSTTHPVQNALFTSLEEAGINKQAFTLTMPCAEAMTDALDKFVVNFENMWSAKKTINKLLDKVILVLLRSHLAAARESKRKLNTTQRRPKISQDRKNLKNRSRLVYRREKKKLRKLKKRKREASLSERHEWISRISKSERRISALRETFKKKLAQLRESSASAVEEDHENQSDDQEEETLGDDVSRRRIAQLKSVVKHLIFSESKVVSESDLKVELPTATQKEITACITIINCVKKFLPARKNYHITAFQLHFCIFANDVLRYTKYQKFTRSLSPVTSMATINAFHLSASTLFQILTQEHNESTATEQNEVVSDVTTPTKLIVYGYSQKPIYSKQESRQHKDATFNSFFDMSSITRKCASYKLKFAHGITCLPGLKVARILGTRLKKKARVEEPVKLTQEQRVIRDQSIIMEAKNSSENLRSRSVDVQNNIKKLELELNNALKTNQDIECSAKIKELKNEWKDSSNDDHYLNVNSMKTKLSKNRRLLYNIQMAIRYKSKLEVAEVPPAITRNNIEVDGKGVSKAESRKMNSPEDFVYAGTDNGLVKMTASTPFDHEREDEEPKFTEEDNKFLNLPPAITTSAADVDLGCGHLLNRQYLIRKKKSVQGEKIKQIEAVMSEDNKTIPVSTQEQLSTFKKHLTFREQLRDFYNAKKLLNRKRHTEVQKAHFCAALCREERSQLRKASGLSKTKKLPLFIGDRGTGVGSRIKGFRRYGGTWKEKVHGDAVNVIITNENKTSQTCIYCYEKLINPKVKKMVSANGENKAVYRTRKGTFICTNPLCFSVIKQRACKSRDALSAMAIGIVGFCTVKFGVSPPPFNIISNSNTESFNKLTFSFLNASEDRQLRCSSGVDCP

SEQ ID NO: 3510 - protein, 809 aa, Mucor irregularis
MSSFEALTQNLIKYITVLDIDDGLEDFQQPIKSIKRRRVTTPDGRNLGDGSGDDFVDNIFKKSTICKPSSSTSSESMIVSKSVSGPDDAATPEDITKASSASASPANSSKRILAIKTTVDNIWKKGYLRPLYNLVEEVNTLVTHTFGFSKYIFLKEMSASTDFNLADCVNKDFFVEVFLALIDRVSLDKNVKARTANFRHLISRHKTSYCQDADYAPRSFKYAQQVALYECTKISTAYRNNIIAQFGNKFRMFLNKLCKKNEKVDTLNQRMKEVGATEKALKAARQNEIFKHIANVKEALSRKQAPNTEFLDEKAISWIKAFLATYPRTYQFEKNSIYYDVKAHPENHFKAFYVIVKFLENEHGSKINCFPLRTSFIPSYITLDSKIVHHNLLQKAKTYKADDKWKTWENVAYKDKKAFKAQGTDKTVRFQGTLETDGVGVSILKQNFEVGKRVSNKKTKERVSDDELKYIERVNQEELKSNKGKYVLIDPGRRDILFCMKETSNKKERQVLIYSKNSRTRLARHFKVLSKTLKPGIVRDAENDLSKTVSATINIEKFRNYIKARALATPVLKEYYGNETMKHNRRYFPDYLNEFSIQGKGNLYFGDLFVAHIRGYFPQKESADESGTLDLYANYLDIMLKQSHISIRLDDSVKNTLIGLIGQIFDDNDSDNNLKQVASQLLQELKLLPFRKMKFSSKIYYDKDDLDLVRRLRRKFKEGSMLVIGNWSAPNVKFQEPTRNKGLIRMLKKNGFPVFLIDEFKTSSFCPECEHALEKFKTIPNPRPHKRTVAPKVVCHGLLRYVIRVGLKR

SEQ ID NO: 3511 - protein, 1146 aa, Mucor irregularis
MKSRKRKQKETFSKDDYKDNPVPIWRSSAKRANEQSAAGPSNKRLSKEERDLRDEKLQQALNKEMIDRLTKKIHDVLIDNDDTGTLKTDCLKMSKIERGMVSNAEEKNGLPVGSITTFIRHNKKSNISFWHDVVNKHFDDLVRKEMDEKTKSDSLLHFNDAEEIESNTSSMNKSHSSESDVTRTISSPLLPLLRKDLTQDMKNWIIKILDVNIEKTTDYLSGLSIRVYKLLLLFTQYSFKLNDDESFELKKTHGLKMKEIIPSFSQSGDTFFSPPWNQACLQNDVFQKQLQELFSFNHLQFIHSCYFGVRGVTNESLDKNPLRKAIFQVIPRIKEEVKSDTDASAMQNALFGYSVNLSNMWSEPKRYYKLLNKLLQVLLNVHLAPTRHQKYKEYLDAKSKANDERTSSSPMKFANKTRNSKRRIFQNERKRANTYEEKARKQPHRDLLAQQSDQLPDSQSTSKDDLATATEVEELENEFEDTSTDLPRRRLNALQRILRALLLKGDYRSVTGEQLTAMNEGLEDNEAAVLAMLYNFIAPYIPERSNRRYFPYQIPFLLMCNQVFRATDSFKFVTKLCPLIKPGSLCALKLDAATLYSLFCSRTAKQQISVFDHENIQIPSMQMAIRRKDAMFGSFFDLQQMFTILDMHSLRFDHYMIVLPGVKLLRLIGHKKTYPPQHTCMENEVEVKKPVADEIKNDYQDPNVLLEDANETLLLQELKMATKERNEFILQQKLRSLKKNWHDHEDKNKVYQSINEYKSERDKLYKRVFQASKDLKNLRRQKYQFQTIDNSEKKWLITKENYKCYQKAEDVKITDEVLTDSLHLSGTDNGIVTMSETCGFNLERFAFHLKLYNKYSALADLSIAEEDQKFLSIPQTIKLTSSRVQYQSGGLRARHLLNRKKKKDKAILEVEKNLSKSSLTGAENPKHLDELYEVHLANREKLRDFYYSNAMIKAKRRSELLLNRTKDRVAALERKFVAGKCNPIMFVGDRGYGIGSTIKGHVKYGGSWKAQVHQRYTSVVITNEHNTSQTCLFCFQKLQHPLKVIIKNEQRYVRSVNGTFVCNNSLCPLKQLNSTHKGRDAVSALAIGISGAATTMLEYPLPVFDPQRDTSQFNTGKFNISAEEFLKRIASRPATVGGITSRHMDE

SEQ ID NO: 3512 - protein, 468 aa, Mucor irregularis
MHTLQLVSIADEAFRNLFRLRVNQIDALYGDQGEVHAVALRNFFRAQFNRWRNTFANTKLEVITDFSYATPARVATILQFYAALLNDIDLHNLNVKRWSLIPIATHQMGILYNLANACKCSGPMIYILLQRLRNRGPLPDIELQHETGTLRFNQGTTRAEFTRHYRIPEFKEHLWQQIFRLDKLVKNRRLENEVNRDRPYQLAYGFKTDGHMISMHFYKDLQGRPPIPFDMGELRTMARKIDVSRWENGMVELIKEPIGLPDDCRIVGVDPGVRDLLCAVERVNVEGQEVNRKAFSISNAEYQVRSGRQWAQMKELQSREHREIKGYLYSARRMTLDYIADNIIGLYPLRVDNETYCKVMLPHKSTKKERRRARKRFRNEITGFRPPTQRTIVAFGDASINSSMKGHPPIPHQQQQRAIARKALLVRVDEYNTSQTCNVCHSHLENVYARENVCFEHRYQDTNFHYYP

SEQ ID NO: 3513 - protein, 232 aa, Mucor irregularis
MNSDLLLQDFDFDEVKSDYNPISIDPGRKPVFTAALGIDENVQIRRCTTEEYYHNTGSTTFSIKINIEKSKAGIDIVESRIPSYKTSDFSKSDKWNPGASKYDRTKIPLIVFGAGMFGKDLFKLEGNRCGVTGVLFRSLKKREITGDLIVVTIDEYKTSKTCSLCFDDNVSVISKSGFRGVGVVECKKCRKLLQRDNNAAINMMTVLKEIWSGRGRPAVFQPKKKEPEQSNL

SEQ ID NO: 3514 - protein, 628 aa, Mucor irregularis
MATINAFHLSASTLFQILTQEHNESTATEQNEVVSDVRTPTKLIVYGYSQKPIYSIPESRQHKDATFNSFFDMSSVTRKCASYKLKFAHGITCLPGLKVARILGTRLKKKARVEEPVKLTQEQRVIRDQSIIMEAKNSSENLRSRSVDVQNNIKKLELELKNALKTNQDVECSAKIKELKNEWKDSSKDDHYLNVNSMKTKLSKNRRLLYNIQMAIRYKSKLEVTEVPPAIARNDIEVDGKGVSKAESRKMNSSEDFVYAGTDNGLVKMTASTPFDHEREDEEPKFNEEDNKFLNLPPAITTSAADVDLGCGHLLNRQYLIRKKKSVEGEKIKQIEAVMSEDNKTIPVSTQEQLSKFKQHLTFREQLRDFYNAKKLLNKKRHTEVQKAHFCAALCREERSQLRKASGLSKTKKLLLFIGDRGTGVGSRIKGFRRYGGTWKEKVHGDAVNVIITNENKTSQTCIYCYEKLINPKVKKMVSANGENKAHSESESEEEFIIHENLHKRAKAEEESYNKPVQHSSSNTKSEETSTEGAGWNDWNKASFGGDDAKKNKFLRLLGAKKSDNKSSLSQSFTPAKKSGGGLYGGLKSAIDEDEKRRITNDLEKQFDHGLQFKKQMQMGRRGGLGFN

SEQ ID NO: 3515 - protein, 344 aa, Mucor irregularis
MRISSVTPRNSFLSRKLKEDAYLIDPGRRDLLYCMKETSTARDKQIVVHTKINRNKLQRHYRWLRQKTKPEAVQNAEVILSSAKSHSLKLEDYVHYIKTRAAVNDVLREYYGSETYNASRNYYPDVRFIFWVKHSGDLHFGNTFITRRRELRSGIDGANYSQMFPTYLDLLIQQKHIFNRFKEEERAEINGIVLHMMVTPEIGGLIERASQILDKLQLVPFRKMKFSGKIFHDQNDAQLLKKMKAKFGKDFIIIIGDWSAPNIKFQEPTRNKGFIEMFKKDGFETYLIDEFKTSSVCPDCESHLENLKNPESKTFHAKKNPTVICHGLLRYVIIPDYKLVSENV

SEQ ID NO: 3516 - protein, 503 aa, Mucor irregularis
MNDLCWELFNMQHIRFSERNYLESKPNSDKSFTGAIRTDGIVLEFICERLVLVPEIPVTPAEVGERVDLNTATIWGLDSGLRDVFAASDDAVAGIEDVPRRHRIRKALIAEYYQLAGFKSATIKRAKHDHNNRDARNIISNCPSLKTSNLETLNLAARYVFQNFATIKGYYTFRLKKLKYHGYRNKQEALSELCKRWKPFTPVDHRDEANAPIIVAFGASQFGVLRGNVPRPTKKFEEALKNYVKATNRADTPVNKFVVMIDEYYTSQVCPLCRTRTTENERDARNNRIHPVLKFEIKKKDAQTDKTDEEATEYHEDEQNKINETEGDESVKVAPWIMENGINVTTLFTEYYKRVEQFVKTEGLIPIETHVQELSALNHILVLKPLQHSKMIREVFTDENIKYVTNEQLKTSMNSSLDFTSDELKQLNLVLKHLTNQTQSVHNIATKLMVFSNSLGYEKRRVIIGIAMLVLKLSKDPIVDITTISESELWSIYFDPFLSAISD

SEQ ID NO: 3517 - protein, 1144 aa, Mucor irregularis
MTRSKKRKQISQYVGNTTLAPELRDDESDNKRIGKRIKTMHEISYLPFFTRSMTEKLNSLIISKISKSDSKTLEKNIKKLKEYIINRKTLPPGLLQQASEYANEAILHQTGERSTLTSGAYKNRLDNEVPRKLIDIWNEYATEDRFDNIVNQEKSRVNVAIREQGSSSTAAQGLHSSVSREEVLQYRTCPVSFEKIIRKDLPDAVNNAVRSKLTDAIENSSDFQAHFLSIIEMFTIIFKTYGLSMDSGATRTSVDILDILPNNFIKDKQLKSTLSASPLPERVKLKYRDELISLFTEQHLQLIQSYYFGARGSNEETLEKHPLQNLLFEIMASEGIQRGSFKQKCKSEEMINVMTKIMTNIKNMWSTNNIFQKLLDKVLLVLLRQHLAPQRETLKQEEVKKKKRDKAHPSLHKRNVVHYEKKKLKKLTKKLNNAAPQERAKLVERFEKSKPKKGETKKKWPEKEEKPNEALDEFVKDATSARILAVRSVLKHMLLYDPSCTASLLKERLYEATEKEIATIKLLFKFFKPYIPQKEDRLSIGHQLPLCILANDVLSILDYAKFVRKLFPVPKFSRLLALEVNSTALYQILTARPSPLKIADFDHFEIESVDFARSNAAAVMNSIFDLNVVNQVCESHGLVFANRIMVIPGLKTARLLGTRKDSKNSLEEPSAPSLVDRILTNTSIVEEAKKVFNVLKREVDTLEGNMKTLQNDLKVLLKKNEPLGLSAKIKEKKKERNDCEDQGLRGEMLAEIVLLKNKRFEEYRKIQASQKAVSDAKQSLHFRRMAMRYHHRLRRSAPATTDPEERPELSKNTIGLFKATECKIKKPADFVFSGTDNGLVNMSTTTPFTLDRFKFHLELYIRYQVLSEENVEIDESDDEVEQFFKLPIPLVINAADVDIGCGYRKARLKLEREKKSSTSGKAVSDAEKELSKKPLNVNLTIPEYLENKEVHIGQSATIRNFYGSAKRATKSRTVEIQKQKFTNRLVSIEKESIKRTVGKRKIVQFVGDRGTGVGSRIKGFRKYGGKWLEVLRSYQNIVCITNEHNTSQLCIYCFEKLCHPRSSNKKISKGALQCVNPGCVSVKAGKAIKSRDALSSLAIGLSGLCSCLLGVTMPHFSPNKISQFDTDNFKNISLAFVKEEQERQ

SEQ ID NO: 3518 - protein, 1095 aa, Mucor irregularis
MYELKWRKFKKVEKNKKKTVDDFKATLSMKEIPTGVVPVVKARVEQMLREGEVAGLSANEIPKSGAWLRKKVHTLKKQGKLSVEGLIDGFINILKNNQNNEDPVESQDYRTVSRSLKCTINHSFDYNTLNTRLDDLQDSCTRVVAGLSKSVLILINLIISGKICTNEGDERKFFKLNDIDLNANGIGKDESDIYLPSREVLKNIETHDLFSFRGFWMILSTCVGEKSVKKKGNIILNIIISELEDSDKHDFTTTPAIQHACKQFYTNFCNMWTKESYKQDLRVAVTLLLRINLAKKRFFKPKRKNKGKEAESVTHTLVSKNKNSKKDMEALFELLMEFQGGKHRKFHCIQKVLKKIFNAQDVVHASTESRKELRGHEDEVPSDGDEDFLNDKELLVPDNETDDVDLTGREINALVSVVVMLCGSESIIGKISPEYIQKQLYTDKKETIPFGALATCAKIVNTLRSITLKENDEASFMNCYPVCHLRNVLARFAGPKTRFNDRKMCPILNDGKKSSVFVTPATLYLLFCKDHNMFDSQNNPFTSYSSIKSDIDKQSLLGNFFDSSTVDRILKEQKLKPCYSFYYSNRYDIKFLGTKAVVKTNKEEVVEVPGIGIKGDEDNLASDDKKQLRARINELNILVKNGKKEYSALIKELRPAEDLRFKWCRYYSIFGDAKFNRYDIKFLGTKAVVKTNKEEVVEVPGIGIKGDEDNLASDDKKQLRARINELNILVKNGKKEYSALIKELRPAEDLRMNAARTFRAKMKNNPNWDADSYLELKGARATCDNIYSKLSSLNVRVKDAQHQMYSMNKKLHSQATISNQHDTLQIPEDVASNLSKGRTLIQGLDPGIVTTAAISCIKPQTLFESINRFEVLNIRSMDAPKHLPVKEVAFDFSAKRVDNAVLSQAHRLEREEKQRKNKRLDIKNLQKRATTRKIRLGRYYKKSLSHDRDEAFRLQNVEKENGSLLTFVGNWSGCSPFLRGHSRRSLKPIVERLASVEGDHVFTIDEFRSTVTCNSCFHLTTKQVVRVGEEKKKKRVKGAVTCTNKNCPRRKTTRATTTNRDQNGAKNIALIGFSRMVSEDGLCLPPFRRKNKSNK

SEQ ID NO: 3519 - protein, 1204 aa, Mucor irregularis
MSRRKRKQDSLYTGTSTLAPEVKNSDEERIIKRPKVQHQLKYVPFFNQAMRAFLWGAIKKKLDNIGKKDVKADLEKMKKDLLEAKRLPSGIIKSAAIFAREALSNQMPSSASYLTDNAYRNQLNNESTELLIESWRNYVEKEFSSIVANLQKATEQTDTEQSTSSAVASTPVNTTSVTEEKLYRTCSIASNKVFRKDIPKHILNIIIEKLKDTMINSSNLQALGMEEGTLEITKLLPAEYVAKNNLSRCFSASPLPADVKETFKSDLDTLFTAQHLMLIYSFFCGPRGSSDLNLLAHPLQNLLFKKLVVNGIPSGSYQQDLQSEEAQNVLSGIITNVENMWQSTQIFNKLLDKLLLVLLKLHLSPKRTNEYKRFTEKKTKSKKKSNRKHQLLYFEKKKLRKFEKKLENVTGAQKDNVEIQRDKSKARLDYLKSLPRSAFLVSVDTNVVSQAMPRTEASSSSSALSPAQPSAKISAQPSGEPSGEPFGETSGEPSGGPSCGPSGRSFGEPSAARFAENVEMEELEIDISRAPDYSGFRIDSVEFARSNGSAVINSIFNMGTIHAACADANLDFENHVHILPGMKLVRLLGSRLVQTTPEATKFTSATSDILSNKEVQKEGGKSIDILTTEIQAAEALLVEHEINLKKLLKEDNYGRTTNTIREKKFARRECAEEDKKKLTDEINVLKNERFVAHQALVNQRREVSEIKQSTFFKRMALRYHTKLSRETTPDAQQPPRQPLSATEHKLFKTSECLVEDPHLFGFSGTDNGLVNMSTTVPFTAERFKFHLALYNRYQLLQEDNVDIDDADHMKYLDLPKKFVINSADVDIGCGHKKARKRLEREKRKTKQGRKVLKAELALSKSSLNSCPTIQDFTNACDTHLKESKILRKFYSSANRARMSRFIETQKDRYSDTIVNKEKVFLTDANDVKTLVQFVGDRGTGVGSTLKGFRRYGGKWLEELRSKRSTVCITNEHNTSQGRKVLKAELALSKSSLNSCPTIQDFTNACDTHLKESKILRKFYSSANRARMSRFIETQKDRYSDTIVNKEKVFLTDANDVKTLVQFVGDRGTGVGSTLKGFRRYGGKWLEELRSKRSTVCITNEHNTSQLCLFCFQKLTHPKGKNQKPIKGSFLCINPACVSVKNGKAAKSRDALSSLAIGISGLSHCLFGTYMPAFSPSKISQFNTDKFKSLSTAFLNEETVRQQRF

SEQ ID NO: 3520 - protein, 445 aa, Mucor irregularis
MDPGTLKTISKVYCYQYICRGEPVWPANIVVPPNFTEEMLKAGVDRECQRFQTLIGEKVTLHTLSKDPQIVYRCLEHILNQYEDEHSRHSSFDVRRLPLPRLFTLLPKPSVRWRFVTISANALCCFLKRPFPNGYVNQLQFFSSVFDFKKLRYHSIDELLPNGENEVLFGNIVKSDGFAVDLLFYRRVSDESNDQRVMESHDLSVSDFSIDEVTEMYRPSFIDPGRKTVFTAAMGLDLNHHEIRRCNTKEYYHLTGSTVYTKKLAERKTRTGIAAIEAATPSSKTARTFSYWRFANYMLANMGALFSFYGFSTAKHRFNLYQGRQRAPEMMVNMLLDGGSKTRKWSPAKFTKQDKEKVPLIVFGNGIFGKDLVKLKGLRCGVVGVLWRCLKKREAAGELLVVPIDEFNTSKSAADVLRNPCQDIQTSEVPVYLSAIHVIHFGSET

SEQ ID NO: 3521 - protein, 1145 aa, Mucor irregularis
MSRRKRKQDSSYTGTSTLAPEVKNSDEERIIRRPKVQHQLKYVPFFNQAMRAFLWGAIKKKLDNIGKKDVKADLEKIKKDLLEAKRLPSGIIKSAAIFAREALSNQMPSSASYLTDNAYRNQLNNESPELLIESWRNYIDKEFSSIVANLQKATEQTDTEQSTSSAVASTPVNTTSVTEEKVYRTCSIASNKVFRKDIPKHILDIIIKKLKDTMINSSNLQAYILCILEMMTILLKKNKFVLKNNRLGMEEGTLEVTKLLPAEYVAKNNLSRCFSASPLPADVKETFKSDLDTLFTAQHLMLIYSFFCGPRGSSDLNLLAHPLQNLLFKKLVVNGIPSGSYQQDLQSEEAKSVMSALVTNVENMWQSTQIFNKLLDKLLLVLLKLHLSPKRTNEYKRFTEKKTKYKKKSNRKRQVLYFEKKKLRKFEKKLKNVTGAQKDKVEIQCVKINLMKASIDTNVVSQNMPRTEASSSSSALFPAQSSAQISAQPSDEPSGEPSGRSFGEPPAARSAENVEMEELEIDISRARINAIKSIAKKFLYSKEPLSETMIKNELHQASRKEIETITSVVNNLKDYIPAKEDRFVIAHQLPLCILANDVFSLTNNVKFIRKLFPAPSFSQLSVLKINPVSLYQTLTKAPQPLNIADYSGFRIDSVEFARSNGSAVINSIFNMGTIHAACADANLDFENHVQILPGMKVVRLLGSRLVPTTPEATKFTSATSDILSNKEVQKEGEKSIDILTTEIQAAEALLVEHEINLKKLLKEDNYGRTTNTIREKKFARRECAEEDKKKLTDEINVLKNERFVAHQALVNQRKEVSEVKQSTFFKRMALRYHTKLSRETKPDEQQSPRQPLSATEHKLFKTSECLVEDPHLFGFSGTDNGLVNMSTTVPFTAERFKFHLALYNRYQLLQEDNVDIDDADHMKYLDLPKKFVINSADVDIGCGHKKARERLEREKRKTKQGRKVLKAELALSKSSLKSCPTIQDFTNACDTHLKESKILRKFYSSANRARMSRFIETQKDRYSDTIVNKEKAFLTDANDVKTLVQFVGDRGTGVGSTLKGKNQKPIKGSFLCINPACVSVKNGKAAKSRDALSSLAIGISGLSHCLFGTYMPAFSPSKISQFNTDKFKSLSTAFLNEETVRQQRC

SEQ ID NO: 3522 - protein, 747 aa, Mucor irregularis
MFNVSVNSSTGTDWPEDSLEPTAEANARALEIQQQCKLGPEPVTMAHISANPELYLRKMHEFLARMEEYNDGRVRTRDEVQVECTYAWVKRVITGTDVFQVLNRKRRIRLAFQIFCSIRDSVPFENRMRLNNPQLSFVRRLITETTQQIQNSRLYLAAEDHNQVNIGDCFRPDMSTSIKKFKLFSLVPLYRYTRQYVEIDSAHMRSLLLKVERELPESNVISEGDSENRHDQATYMFSQVLDFEAVRLNVNYNGKCMFTNLIRTDGYGIDFVLARPKNQRASLPDLELSDFTADEVQERFHLWGADPGANVVFTASDGHDNDPHQIRKYSIAEYYTRAGFKKTNKRILQFKNNDRAFLRVERGIPSHKTANLTTYAAFIEYLLLNLPALFQFYDDRFTSLRFLNYIGRQRADAEMVNIFVTGGKKYLHKQFKQTGRNQDKRGPRKKRKKREKRSDAKRDKGKGREKTRKHRPLPFEQDNRIPLIALGDAVFPSTMRGTIPGVAKRLPRLLKKAELEGLLVIVPATEYMTSKTCSNCSLANTEYVQRFIAPESMNCSAPDTGNMEVFAKYGTPAQKEKWLKPLLDGKIRSAFAMTEPRVASSDATNIETGDKGKGREKTRKHRPLPFRQDNRIPLIALGDAVFPSTMRGTIPGVARRLPRLLKKAELEGLLVIVPATEYMTSRTCSNCSLANTDYVRVDGVSLFGVLRCQNPVCHTLWQRDVNASRNIHNIAWNVITNGHIPARFQRG

SEQ ID NO: 3523 - protein, 1134 aa, Mucor irregularis
MTIWPNSNQSDGLPSFHVLEHKSSYLHSCAYYALKPMSKKINRPRVILQSEETTTVVAIKRKDNEKKPVSSRHSLGGALDDLVLQQLDEESSKMYSRKWLKFQNDDKSKKKTLDDFVKTLSTKSIPTGVIPLVKTKVEQLMKDNKIENLTAKNIPTSALWMHHIVEKLKKKGQLTIELLIENFVKMTKSKIQDDREVDDSTENSNFGEVTHVTEEKEYIRTVGKTLKGVINPKFDYDELLGRLDQLQHESNLAIFGLSKAIQTLFELLLSGKIQALPDSNVSFRIRNLDYNNDGLGKDEPDLTIISEEGKKVFQDEKIFAYSGFWLILSRCVASKNPHKNTPLIKEISEKMSQEDIYAFTTSPAMGSACKQYYTNFNNMWLEEKYRDDLRVAITLLLRINLARKRYFKHRKPSPQSSTTPSPLKKNKSLSGSMKLLFELLLKFQKSKHRKVHSIEKVVEAIFCGDEKPTVAQHQAIEQDEDGMFQKQESDDEDEGLVPGGEKEKETDNTLENDRDLTSREIKALVAVVTMLCGSDSIVGTVKPDFVKKQLYLDKQETIPERALVLCSKIVNSLRAISLKKNKDPSFMECYPIRCVRNALVKFSGYRTKFGERRLWPAKDKEHASSIFVDYRSLYLLFCKDYNIVKTEDAFFTSNQEIKNDQDKRMVFENFFDHKTIDRILKEQHLEPSYSFVYSNQHDLNFLGFKTSTPLGQQPTTSNEVETPGPVVDKASIDNDIKVVNSKIKIHRKEYAPLLKSIHEEEWRRMDLARSFRKKEKEKQPWDAESYKILKQKRNECDAIYSRLQESNGSIKNLQSKMYLLNKSKRGQKFPSTTNTMMIPKRIEQGIMDGSTLVQGLDPGVVTTAAVSCLSTQTLFESVNRYKVLEVGETVKLDAVTAKYKNHEYTYTAGKINRAVLSTAHRLLREKKQRDDVQIRPKVLQKQAVTRKIRLKRFHQLFHSSQRSKMFEHHQVQEKAGAVCSFVGNWSRQAMYIRGHILRKLDPILERFNSFQDHACLVDEFRSTITCSSCFQVTSKQLVRVQETKKKRIKGAVTCNNKNCPRRAARMTTINRDMNGAANIALIGFSSLISQENLPLPPFQKSRNETTKYNLAERYQGARMATLIHRIEFETDHTS

SEQ ID NO: 3524 - protein, 1327 aa, Mucor irregularis
MPRKKAEQHSSFEGNSVPIPISALETTQPFEQTRRKWRSQSREAFLMAFEKAFEDHIREWISNNRKKISSGKAILKAGRSLPRGFLTKVDHIADLEKGESSMRFKDDNGLPLAPAVWNQHLDSKYDSILNQYQASSTPSSFVNDLSLNSPMSEGTPGGSSSVGNPGSTSSVTSGGEEELDYNQLFSALEAIEDQEDEEYYAVTTVRLNSILRGDITEDLRKKFIKKMEDLIPMISDFTIDFQMIVFFTMSLFRTHSVMEDGEKIFLQSNQGFETKSIFPSDFNMLKQLEYSSGPPPSTQSTTANLEMTYLFSEGHLEMLLSEYYGIKGMKTSSKVKHPLVANLMENSKLELQEHLKFKKDALPRPCYAAAVTKFQVNLQNMWSNNKMFNILLDKLLLVLLRSHLAPNREGKRRDAIKSWEENKKKSGTAPQSQKLEATSSDSNCRSTFRGLNYRYKQCNRKKKEENDKWARKALKLKERLDLLKASLKKADATGKRKMLSSGSNNPNKALAIFSPEKPGVPVRLPQSNTPAVNESDDQNDSDEEELTPAEVGQDTSSKRITNLKGFIKSLLFNEESISEQLVERERTDLSRQEKSIILLIATKLKPYIPTKENGVHIAYQLPFVILANDLLRCAGYEKFTRKICPTPSTRLNAFRLDVTSLYALFCQHGQDRLRFFHYNGQLFRSLREVFSHKDTVFNSFFDIEKIQAACKRSDLKFSHNITILPGSKYVRILGVRQKTPKKTTASLSDKKKRKQNIPESKWNLILNQADKDKKTLRKEINELQEKINALSKELKSFYKAMKDGNFAAKIKLAKSFWKSPFDPMELSDVSKLQSTTNMLESIVQTGMDSSDNRNNLNRQTESSAQGGIKMKANAVPGSSSVLPQKEIAIQGGLSSQQGLKGVEVIRKNIYTFINKLKDLRYKAHLDIQGCRRELSHTKSEQYIRRKALYLPKRNQAMQARNVTKIEKNDCEKGSITHTENASLVPDAAAISKDFIFSGTDYGIAKMSVSVPVTIEKYKYHLSLYNRFSALDTPSEELEPDFEPLPKIVTVAAQDVHFGSREFSHREKLAELKKTNQKVLDTEKKMAEQSLSQATNQDEIWKAYNCTQDSRETLRNFYQSPRMNAWSMRRENFKRKAKDRICVRERKSLNPTRKKAKNDDRKGKGRQTHETSKNLIMMIGDKGKGVGSTIKGHLRYGGNWKQDIHARHTTVCITNEDYTSQTCIYCYEKLHHPTQKVKKKDKTINKTIKGTFICYNPKCPSVRKGYATSSRDQMSALAIAISGITVLLFQEMLPPFTSNVSHSNTELNKKLEPFCIGSGAKAGSSESL

SEQ ID NO: 3525 - protein, 425 aa, Mucor irregularis
MRLNNPQLNFVRRLITETTQQIQNSRLYLAAEDHNQVNIGDCFRPDMSTSIKKFKLFSLVPLYRYTRQYVEIDSVHMKSLLLQVERELPESNVIFEGDSENRHDQATYMFSQVFDFDAVRLNINYNGKCMFTNLVRTDGYGIDFILARPKNQRASLPDLELSDFTADEVQERFHLWGADPGANVVFTASDGHDNNPHQIRKYSIAEYYTRAGFKKTNKRILQFKNDDEAFLRVERGIPSHKTANLTTYAAFIEYLLLNLPALSQFYDDRFTSLRFLNYIGRQRADAEMVNIFVTGGKKYLHKQFKQTGRNQDKRGPRKKRKKREKRSDAKRDKGKGREKTRKHRPLPFEQDNRIPLIALGDAVFPSTMRGTIPGVAKRLPRLLKKAELEGLLVIVPATEYMTSKTCSNCSLANTEYVQVDGVSLP

SEQ ID NO: 3526 - protein, 751 aa, Mucor irregularis
MSKDPGSEKKKLEKRISTIKTSIQNIEWKKDYKDNLHELVLKVNLLVTHAYAFSKYIFIKELETDPTFDLNSSISSKFFTEVFITLTNTKQLVNRVNPETAIIRTLLWKHREDYLRHSKFRPTSFSYAQQNALYEAQKIFTAYTNNISGERVKELRLRMEKSNYSKKQIDNMIRTTITNVCTKVYKPKMFGVKHEIVESRYILRKFINKLLRKEERVKELRLRMEKSNYSKKQIDNMIRTTITNVCTKVKLSISKKDINQIPKDFLTEDKLKLLQEFISAYPLNYQFDKDSIYYDVKSRPENHFKPFFVLSKLCECHDISVPVCFPLRKTNIPCHITIDTKILKEQIIKAPKSKDNKMEAWARVVNLGCKAFKEQGQKRSLGGKSSVDKVGEISTYVEDVDISNTEGKCVLIDPGRRDLMFCIHESSTPTNPQMLRYTQNTRAYETKSRHYRKIRQSLKPDEIETLELELSKVPSSTVNVSKYETYLQTRGRVDELLKRYYSCESQAAYDAFRFEDYGVSLKVDENCCLVFQAQHKSNSRKRNAMTITRIKGYYPRNRNNDDNDSAYNLGLALMEPHFTNRMTEEDKVEAQMLVEKFYDKSLSLKEFEDLSSLILKKLLLIPFRKLRFSTYVNGRKSDQLLVKNMQTKFNQDAILIYGNWSAGNSKYHEPIRGKDEYKTSTFCPQCKFSPVEKFKKIDNPRKHNRHKMPQVLCHGLLRCTNRKCLESNMRLWNRDVVGALNFRHILNELRS

SEQ ID NO: 3527 - protein, 1166 aa, Mucor irregularis
MNRKKTHQESFFEGVNTPPPLLTEQRPKRAAPVADSSENDSSKRQRLESSFVQSIKDRLKSMVLSETKKKKPDLVKLKDNLLNKKTLPPVPNAAKLASCDLHEMNKYLEHRYVRTNKQEWQAAVYKHFDEYAQSSSNLSAEPSSSSASTSHAEPLEEEEEQYSVFTVPIYEIIRKDLSTEVHRLIMTKISTSMIRTTDFVVCFSSLIQMIINMFRSYQFVVDGVNNISFRQTPGFDLKSIMPSSTNDLESCFTVQPLDDRLLETASLFNDFSQLFTSQHFGVLFSHFFGSRGINALHSTTHPVQNALFTSLEEAGINKQAFTLTMPCAEAMTDALDKFVVNFENMWSAKKTINKLLDKVILVLLRSHLAAARESKRKLDTTQRRPKISQDRKNLKNHSRLVYRREKKKLRRLKKRKREASLSERHKWISRISKSERRISALRETFKKKLAQLRESSASAVEEDHENQSDDQEEETLGDDVSRRRIAQLKSVVKHLIFSESKVVSESDLKVELPTATQKEITACITIINCVKKFLPARKNYHITAFQLHFCIFANDVLRYTKYQKFTRSLSPVTSMATINAFHLSASTLFQILTQELNESTATEQNEVVSDVRTPTKLIVYGYSQKPIYSIQESRQHKDATFNSIFDMSSITRKCASYKLKFAHGITCLPGLKVARILGTRLKKKARVEESVKLTQEQRVIRDQSIIMEAKNSSENLRSRSVDVQNNIKKLELELKNALKTNQDVECSAKIKELKNEWKDSSNDDKGIIYKRIQEFKKKRIDHYLNVNSMKTKLSKNRRLLYNIQMAIRYKSKLEVAEVPPAITRNNIEVDGKGVSKAESRKMNSSEDFVYAGTDNGLVKMTASTPFDHEREDEEPKFNEEDSKFLNLPPAITTSAADVDLGCGHLLNRQYLERKKKAVEGRKIQQIEAVISEDNKTIPASTQEQLSKFKQHLTFREQLRDFYNAKKLLNKKRHTEVQKAHFCAALCREERSQLRKASGPSKSKKLLLFIGDRGTGVGSRLKGFRRYGGTWKEKVHGDAVNVIITNENKTSQTCIYCYEKLINPKIKKLVSTNGENKEVYRTRKGTFICTNPLCFSVIKQRACKSRDALSAMAIGIVGFCTVKFGVSPPPFNIISNSNTESFNKLTFSFLNASEDRQLRCSSGVDCP

SEQ ID NO: 3528 - protein, 687 aa, Mucor irregularis
MPTRYMTVKCAVPDAMVEEGGFEPELVSRSAEGDVTFAREVQRVTQQHLMDYVEYVNYVTRAAYAFCRYIFLRIVGERQIQVNTLVDRKFFKQVWLSLTTVRSSGRAQAETVRHRDLIGRFKADFINLTQINLTTFRCPDQQATYSSTRIEADYLNNIELHFGNRLRQVINHILDLRAVKAAATERLRRSTASAAQIRQFIQEHITDPANRFKDTIAAGNQEALRLGEFGVFNGYRESFAFFFDSYHEGYTFANGNVFYDVKANPANHFLAFFNLARHLQSISETNVSLFQVCPLQSKNYPLYVQLDTRIICMEFFRLSLQMSRQFTNSLINKRAAWSKVFNLGAAMFQDQRYGIFSEILRFRGTIYTDGVGLSILKSNTDTTAGSMRMQANRQVDEFKFITEANTPSETELLARNCVLIDPGRRDILFCMHEGSTREVPLVCRFTKSRLQRKSYLKRARRITRQALRGAPHVRHAQDRLNVFSAKTTIPEQFNNYLDAHFTSEHARIVRDFWSNTLTPRTAQPLFRSLKLKITTKMNREYQRLANELRDFYPEGETSPPTLVIGNWSAPNARFHEPTPGITLKRKLRSLGLPVFLIDEYRSSSTCPQCQQRSVAPFMYTRNPRPHRREARPWVQCYGVLMCNTPACIESGTYIFHRDFLACQNFRHALIEVRQTGEMPQRFRRENQ

SEQ ID NO: 3529 - protein, 1373 aa, Mucor irregularis
MKRRLTEQGVRDHTRRKRHSQPENTPPNPDPLQFQCDTKVPVASSADNPASVASYQSAVDNYERSFGESLSEAKSYLKRFRIQVWNAKLSAKHTLSATYLIHALNKKVESNIKMTSNMHPNVAVTPKDDLLVFAFCQVYKCRIFLFSSRAKPEIVTPKDNHNSAAIPSFALLKHCNSFIGKTTWYELKFNNNLKDRSRVDETLATEDTLFAQKRGAEESKPRLKKHTLGSSVDGQILQLLREEVFSIFDKRWLAFVKKQTNLTDEETISSFLSTLPAKSLPNGVVPIVKAKIEKMMRDNEIPGSVPQSPMWVHKRIETMKKKNEVSIEGFINDFATNLDVSKVRPPIQVAEHADQDAGGNTGEDAAGEVSEEFEVDKDDFRVVGRTLKRVINNHVPYDEVIEKFDSLQANCEEVITGLSKAVKILTTMVLSGDKSITNGADASLFDLNKLDLHKNNIFPGKEKIAILDDASIKYIEKSNIFHYGQFWNIMSTCVGEKSLQKDKHPIINAIKNKMKKEDTVKFTTTPALASACKSYHTNVTNMWTADRVQSDLRVVIILLLRIHLAPKRFFRQKSKKKSLESINQNNVVNTSASNCKIGKTKAMRDLFHLLQRHNGDNFGNKLQVLQKLVDVIMKEKVKIPSAQKVEETAPVDVVDDLEKDISDDEDEEDIYLVKDDFEDLTSGEIKALTSVSLMLVQSNSITGKINEIYIQKQLYGDKRESIPLRGLQICAEIINALREIVPVKGSAYSLANCCQVRHVRNLLVEFSGTKTRFRQHRLTAEKNQSNSNKMGILINHVTLYLLFQKEYNMYKEDGSPFTSYQSIKTWEDKKAIFSNFFKFDVINKIMAERQLAFKFSFLFKDRYSLHFLGQLDDMVAEEPNKSTSTAETSPPTKTAGGGKEEIDALVAEVKKNSLLLKELRKDFKEAEVKRMDLANTFRKQEKISWDQDMYNELKSQRNTCNTLYSDIDRLSSAIKNARMKMYDRIVGRTLKRVINNHVPYDEVIEKFDSLQANCEEVITGLSKAVKILTTMVLSGDKSITNGADASLFNLNKLDLHKNNIFPGKEKIAILDDASIKYIEKSNIFHYGQFWNIMSTCIRPTADRNCMVQKLKEGNVIVQGMDPGIVTTAAVNSRSSKLLFESLNRFAALQSNGEPVNLTTPSTDNKQIAFSLTAGLVNSANFSTIYRMKREHRKRKGLELDHTYLAKRTLTRKIRTNKAYQHIYATQRDGLYKQLNLNKKTTPVCVFLGNWHQQSTYIKGHSRRSLKPYLSRVNSYKSDYFEVVDEYNSTLKCNSCYRSTMKQAIRTGHQTRRIKGAVVCMNKDCPKRKSDRSTTCNRDQNGAMNIAMIGFSALVSQDGLALPPFRRGYNNSNK

SEQ ID NO: 3530 - protein, 1152 aa, Mucor irregularis
MKRSQNDQGSSHPRKRVQYSEGGFDHHYEDSKSYKMVEDAKKHFGDKHLLGDGKLYSNLLGFGHVGDGNLHIMANLKGFDRHGQEAMDEFVFDWTMRHNGSITAEHGVGVSKVGYMKRAKSNVQLDLMRIIKNAIDPNDVVVAKLRGAEEKKPRKAKHKLGTTLDALVVNYIEEEANRMYESKWKKFKKVEKNKKKTVDDFKATLSMKEIPTGVVPVVKARVEQMLREGEVAGLSANDIPKSGAWLGKKVHTLKKQGKLSVEGLIDGFINILKNNQNNEDPVEIQEYEDEPSVSEVIGEDENDYRTVSRSLKRTINHSFDYNTLNTRLDDLQDSCTRVIAGLSKSVHILINLIISGKICTDEADGGKFFKLNDIDLNANGIGKDESDIYLPSKEVLKNIETHDLFSFRGFWMILSTCVGEKSVKKKGNMVAVTLLLRINLAKKRFFKPKRKNKGKEAESVTRTLVSKNKNSKKDMEALFELLMEFQGGKHRKFHCIQKVLKKIFNAQDVVYANTERSKELRDHEDEEPSDGDEDFLNDKELLVPDNETDDIDLTGREINALESVVVMLCGSESIIGKISPEYIQKQLYTDKKETIPFGALATCAKIVNTLRSITLKENDEASFMNCYPVCHLRNVLARFAGPKTRFNDRKMCPILNDSKKSSVFVTPATLYLLFCKDHNMFDSQNNPFTSYSSIKSDIDKQSLFRNFFDSSTVDRILKEQKLKPCYSFYYSNRYDIKFLGTKAVVKTNKEEVVEVPGIGIKGDEDKDLASDDKKQLRARINELNILVKNGKKEYSALIKELRPAEDLRMNVARSFRAKMKNNPNWDADSYLELKGARTTCDNIYNKPSSLNVRVKDAQHQMYSMNKKLHSQATISNQLDTLQIPEDVASNLSKGRTLIQGLDPGIVTTAAINCIKPQTLFESINRFEVLNITSMDAPKHLPVKEVVFDFSAKRVDNAVLSQAHRLEREEKQRKNKRLDIKNLQKRATTRKIRLGRYYKKSLSHDRDEAFRLQNVEKEYGSLPTFVGNWSGCSPFLRGHSRRSLKPIVERLASVEGDHVFTIDEFRSTVTCNSCFHLTTKQVVRVGEEKKKKRVKGAVTCTNKNCPRRKTTRATTTNRDQNGAKNIALIGFSRMVSEDGLCLPPFRRKNKSNK

SEQ ID NO: 3531 - protein, 1116 aa, Mucor irregularis
MSRRKRKQDSLYTGTLTLAPEVKNSDQERIIKRPKVQHQLKYVPFFNQAMRAFLWGAIKKRLDNIGKKDVKADLEKMKKDLLEAKRLPSGIIKSAAIFAREALSNQMPSSASHLTDGAYRNQLNNESAELLIESWRNYVEKEFLSIVANLQKATEQTATEQSTSSTVTSTPVNTTSATEEKLYRTCSIASNKVFRKDIPKHILDIIIKKLKDTMINSSNLQAYILCILEMMTILLKKNKFVLKNNRLGMEEGTLEVTKLLPAEYVAKNNLSRCFSASPLPADVKETFKSDLDTLFTAQHLMLIYSFFCGPRGSSDLNLLAHPLQNLLFKKLVVNGIPSGSYQQDLQSEEAKSVMSALVTNVENMWQSTQIFNKLLDKLLLKLKNVTGAQKDKVEIQCVKSKARLDYLKSLPRSAFLVSVDTNVVSQAMPRTEASSSSSALSPAQPSAKISAQPSGGPSGRSFGEPPAARSAEMVEMEELEIDISRARINAIKSIAKKFLYSKEPLSETMIKNELHQASRKEIETITSVVNNLKDYIPAKEDRFVIAHQLPLCILANDVFSLTNNVKFIRKLFPAPSFSQLSVLKINPVDNIAPQPLNIADYSGFRIDSVEFARSNGSAVINSIFNMGTIHAACADANLDFENHVQILPGMKVVRLLGSRLVQTTAEATKFTSATSDILSNKEVQKEGEKSIDILTTEIQAAEALLVEHEINLKKLLKEDNYGSITNTIREKKFARRECAEGDKKKLTDKINVLKNERFVAHQALVNQRKEVSEIKQSTFFKRMALRYHTKLSRETTPDAQQPPRQPLSATEHRLFKTSECLVEDPHLFGFSGTDNGLVNMSTTVPFAAERFKFHLALYNRYQLLQEDDVNKENEDHMKYLDLPKKFVINSADVDIGCGHKKARKRLEREKRKSKQGRKVLKAELALSKASLKSCPTIQDFTNACDTHLKESKILRKFYSSANRARMSRFIETQKDRYSDEIVNKEKAFLTDANGKSQNPSQVQFVGDRGTGVGSTLKGFRRYGGKWLEELRENQKPVKGSFLCINPACVSVKNGKAAKSRDALSSLAIGISGLSHCLFGTYMPAFSPSKISQFNTDKFKTLSTAFLNEETVRQQRC

SEQ ID NO: 3532 - protein, 316 aa, Mucor irregularis
MYLMNKSRAGQEVKVDEKEFATSTKILSEIRKGNVLVQGIDPGIVTTASVNCTKSSTLFNSINRFQCLEDGETELVHQHDEEDLKNLRYNITARRVNQIVLSTHHRLQRERKQKLSESIEKKSLEKKTVTRKIRLKRYYKKYISSNRDLMFQHFQTKKEKGSLITFLGNWSRVGSYIKGHTRRSLGPVMDRLKSVEKDSLYTTDEFRSTVTCNSCFSITTKQLMRVGDNRTRRIKGAVVCSNKHCPRRINSNSTTVNRDQNGAINIALIGFSKIVSVDGQALPPFRRNYKSSKYTLLNDFIGTRMVTAASPPAGGN

SEQ ID NO: 3533 - protein, 717 aa, Mucor irregularis
MHRIKRNNSIIISNKKKAIWNQRKDKAATDKFKDVQCKDCAEVGHYSKAYFKCKLYEEDDGNKVGSSSKKRKKAQNEVTKMNKKIARQHSTDQSSAVCKSCKQKGHSSSRSPQCKNHTQSKDEIMKAHLGSDYITRTVKLPFKNCVHDNYAHVLRSKILTTSDDIRHIVFRAKIFVNYFVLSTSNQQNHTGLFQQNFWYSICQLVNDRQHTNKKILDQNILTHWHVFKEKFPKIVYPKSLQPGASACLTETCKEIATSYLNHIVEGFEPKLCAFVRYHIRQKFGDDLNSHLLNGIVDNYCYQYICRGSPQWPDHELLNESMKTYINRFCYPLRELLNTRVSLTELSAAPEKFIPFLFHLVRLQENQSESLSENDIKPRSISALPRPKLHWRFITVNLQALTAFVGVGTRPSGYVDQLKLFYRVFDFHRLRYKSIDELLPTHDSDTLFNNMIRSDGSTVDFLFCKKKPIGYVDENHLENLDLELGDFHHSEIESTFHPIALDPGRKSVFQATTNSTNGQHFRRCTTREYYTLTRSSKHLKKVQSAKKVDGTQDVESKMPSCNTAKSLLLAKKDLTSTKVSNQQQMKWPSKYKPAQFELSSSKVPLVVFGDGMFGKDNVKLKGNRCGVTGKLWKALKRREKFGNLVAVTVDEYLTSQICSKCKKRRLVDAGNKGRSTLICLECMTIWQRDVNAARNMLEKAESVWKTGEVPEEFQRKKK

SEQ ID NO: 3534 - protein, 266 aa, Mucor irregularis
MNLLGFDTVRQLTGNDESKAFTGAFRTDGVAIDFIFDRPRQRPAEALAPADVARLVDLNEATIWGVDPGQKDIFVASDGDSSNTHRIRRTSTSEYYFMAGYKAANIKRAKYAANNIELRQLISAAGSFKTASRNNLEETLRTTFQNFLQVRNFYNFGQKSLRFTLYNKRRRALTEICKRLLTGSEKYTNLPPIQQSNPLKWKPVTPSDQRHEQQRPIIIAFGAAQFGALRGNIPAPTKALKKALNHFVKAPHYILRAHIRMVEDFW

SEQ ID NO: 3535 - protein, 525 aa, Mucor irregularis
MATINAFHLSASTLFQILTQEHNESTATEQNEVVSDVTTPTKLIVYGYSQKPIYSKQESRQHKDATFNSFFDMSSITRKCASYKLKFAHGITCLPGLKVARILGTRLKKKARVEEPVKLTQEQRVIRDQSIIMEAKNSSENLRSRSVDVQNNIKKLELELNNALKTNQDVECSAKIKELKNEWKDSSNDDHYLNVSSMKTKLSKNRRLLYNIQMAIRYKSKLEVAEVPPAITRNNIEVDGKGVSKAESRKMNSPEDFVYAGTDNGLVKMTASTPFDHEREDEEPKFTEEDNKFLNLPPAITTSAADVDLGCGHLQNRQYLERKKKSVEGEKIKQIEAVMSEDNKTIPVSTQEQLSTFKKHLTFREQLRDFYNAKKLLNRKRHTEVQKAHFCAALCREERSQLRKASGLSKTKKLLLFIGDRGTGVGSRIKGFRRYGGTWKEKVHGDAVNVIITNENKTSQTCIYCYEKLINPKEGNFYLHKSSLFFGHQAKGMQVARRVVRNGDWDSWVLHSEVWSEPSTIQYNQ

SEQ ID NO: 3536 - protein, 970 aa, Mucor irregularis
MSRNDLSANEHRSRIVSNKKEIVFNNRLPPDLEANSKCVDCEEVGHFDKNYYRCKYYKEASADDVGGSNNKRKQSTTIKQEKKASKRQKYATENPVGMHCKKCGGDNHNSARSALCPFNILPKAKVLEQNLGSQHYKAFTRKLPFDQCINQPYHNIKNKITQTCAAVREITFRAKIFVNFYILSNANNDEAYKGIFNKNFWYSICQLVNGQRVTNQSGIPAGLITAWDDFRSRHPNAQAQISLLPGASQCISEACTEIETLYHNNVVETFEMKLEKFLRYKIQMALPYIDDKSLISSLSHDYCYQFICQGDPVWPENNLVNDEVKAVVESICVPLRQTLNKKVTLKELARSPSTFVKFLLHINTQFEREIELHNAYDVRRLPLPKLLNVLPSPTTHWRFITISMNALSSFARKPLTQGYQNQLQLFYEVFNFKKLRYNNISELTPNGNNEVLFGNIVRTDGFAVDFLFYKRNQVGSGSDLNNFDLALEDFTYDEVAQDYHPIFVDPGRKSVFTAVSGLDEAHHPVLRCTTKEYYHLTGSTNFSIEQNKMKARLGITAIESAIPTAKATNPGHFEEYASKTANKRFRLYQGRQRAAEAMVNYLANGGDKYNRGRRPKVKKKRKKNRRRPAAHNEPSAKDKWKPCKFQYDKKKVPLIVFGNGMFNKDTAKIKTLKHGATGVLWRALKKREAARQLIAVTVDEFRTSRVCSKCGHFAVACTEPERLCYNCKQPGHVTSECTSERVKSCFVCGEVGHLIADCPERANAAASSLSKARCFNCQQLGHLARNCTNETQPRSVEIQQGEEQVTQDAPYFRGNGHMHNSSSSSRGRGGRGGRVGRGGRGRGGRGGFRSTVPPAVRRNQIVCDHCGGLNHFAKDCQASDIVCHNCSKHGHIARDCPVPYTMESHHHRSNTTIKTCYACGKPGHIARNCLTARRERDDDEESEGADTTDSDASSSGSAVTDSEEESESDA

SEQ ID NO: 3537 - protein, 263 aa, Mucor irregularis
MQLFVKSLAGNTLALEVAPSTSVENVKAMIAAREGIDADFQCLSFAGKSLQNSEALALYGVQDNSTLHLNAELLGGGKKRKKKTYTTPKKIKHKRTKVKMAILKYYKVDESGKITRLRRECPNATCGAGVFMAKHKDRQYCVFVSEKYTTLPPIQQSNPLKWKPITTSDQRHEQQRPIIIAFGAAQFGALRGNVPAPPPIPTQDPHPYNNGRFLVMVNEYLTSQICPRCQTRIVVRARNDMNKRSAHSVLNCETCGTHWNRDH

SEQ ID NO: 3538 - protein, 498 aa, Mucor irregularis
MPGLKTARLLGTRKDIKNSLEEPSAPSLVDRILTNTSIFEEAKKEFNVLKREVDTLETKLKTLQNDLKVLLKKNEPLELSAKIKEKKKERNNCEDQGLRGEMLAEIVLLKNKRFEEYRKIQASQKAVSDAKQSLHFRRMAMRYHHRLRRSAPAATNPEERLDLSKNTIGLFKATECNIKKPVDLVFSGTDNGLVNMSTTTPFTLDRFKFHLKLYNRYQVLSEENVEIDESDEKDEEFFKLPKPSVINAADVDIGCGYRKVRLKLEREKKSSTSGKAVSDAEKELSKKPLNVNLTIPEYLENKEVHVGQSATIRNFYGSAKRATKSRTVEIQKQKFTNRLVSKEKESIKRAVGKRKIVQFVGDRGTGVGSRIKGFRKYGGKWLEVLRSYQNIVCITNEHNTSQLCIYCFEKLCHPRSSNKKISKGALQCVNPGCVSVKAGKAVKSRDALSSLAIGLSGLCSCLLGVTMPHFSQNKISQFDTDNFKNISLAFVKEEQDRQ

SEQ ID NO: 3539 - protein, 1840 aa, Mucor irregularis
MSKRKRKQDSLYTGTSTLAPEVKNSDEERIIKRPKVQHQLKYVPFFNQAMRAFLWGAIKKKLDNIGKKDVKADLEKIKKDLSEAKRLPSGIIKSAAIFAREALSDQMPSSGSYLTDNAYRNQLNNESPELLIESWRNYIDKEFSSIVANLQKATEQADTEQSTSSAVASTPVNTTSVTEEKLYRTCSIASNKVFREDIPKHILNIIIKKLKDATINSSNLQAYISCILEMMIILLKKNKFVWNNNRVGMEEDTLEVTKLLPAEYVAKNNLSRCFSASPLPADVKETFKSDLDTMFTAQHLMLIYSFFCGPRGSSDLNLLAHPLQNLLFKKLVVKGIPSGSYQQDLQSEEAQSVMSALITNVENMWQSTQIFNKLLDKLLLVLLRLHLSPKRTNEYKRFTEKKTKNKKKSNRKRQVLYFEKKKLRKFEKKRKNVTGAQKDKVEIQRDRSKARLDYLKSLPRSAFLVSIDTNVASQTMPRTEASSSSSALFPAQSSAQISAQTSGEPSGEPSGRSFGEPPAARSAENVEMEELEIDISRARINAIKSVAKNLLYSKEPLSETMIKNKLHQVTRKEIETITLVVKNLTDYIPAKQDRFVIAHQLPLCILANGVFSLTNSVKFIRKLFPAPSFSQLSVLKINPVSLYQTLTKAPQPLNIADYSGFRIDSVEFARSNGSAVINSIFNMGIIHAACADANLDFENHVQILPGMKVVRLLGSRLAQATPEFSKFTSTTKIQAAEALLVEHEVNLKKLLKEDNYGRTTNTIREKKFARRECAEGDKKKLTDEINVLKNERFVAHQSLLSGETTPDAQQPPRQPLSATEHKLFKTSECLVEDPYLFGFSGTDNGPVHMSTTVPFTAERFKFHLALYNRYQLLQEDDVNIDDADHMKYLDLPKKFVINSADVDIGCGHKKARKRLEREKRKSRQGRKVLKAELALSKSSLNSCRTIQDFTNACDTHQKESKILRKFYRSANRARMSRFIETQKDRYSDKIVNKEKAFLTDANDVKTLVQFVGVRGTGVGSTLEGKNQKPIKGSFLCINPACVSVKSGKAAKSRDVLSSLAIGIFGLSHCLFGKYMPASSPSKISQFNTDRFKSLSTAFLNEETNLIRYKHLLSLKFIIMSSGIAEIMRKRLMDSIRSIQPAGKWKIIVVDSKSSLILNAACKMYDILEENVTLVENIEKKRQPYPTLEAMYFLTPCRESVLRLVDDFSTKPPAYKAAHVHFTSGLSDQLFDDLNRRLKSSGAAEYILSLKELYVDFMVAESSVFTVDPTTSFLSVFGEDPRADPDASLKTTAKQLLSVCATLGEDPIIRYQAQSEGGIHPQGSPAGKLAHMVQQEVDGFCRLNPNFPPPRQPPQPRATLLIVDRSIDPAAPLLHEFTYQAMINDLLPVEDTENGTGIKYSYEFHQADGSMGSKDVLLDEDDNVYKSIRHMHIAECSDRLIEKFNEFLSENKAATGDRNSTSGAPKNSAKSLKEMKEMLTNLPQFQDLKAKYSAHLSIAQECMSFFERHKLNSVGNLEQNMVTGETADGETPKTIVLDMVPLLDDPHVSQADKARLLMLYIIWKEGGIFEDDKRKLIEHAKLKGEYRDAVNNLPLIGVKLTRLRSKEKSSFLKKRKPKKNKDEESPYELSRYVPTLKKIMDAHVSNTLDPIQFAFTRKSDMEPTEDHGHAPGQGGIPASGVSLRTTKPTWSKRTNSTTGPLPVNNGAKLIVFVIGGATYSEIRSTYEISEAYNRDVYIGTTEILRPTHFIHELGSLRQPVPAPRSVIAPYVAPPPPQMQKHDSSMSKTASLMSHMHISSSSSNSSPHLSNKSSSMSLDKMSQNTEDSKEKKKKKGLARLFG

SEQ ID NO: 3540 - protein, 342 aa, Mucor irregularis
KGTSSKNPKLKEIDNAKVARLQAEVKAIEKDLQDLIKKKTDFLIGNRIRLIKKGWVKVEGTGATSSNQIDHNKSIFDRVEQLKRTRNDLNFSISMKKDELQKARKSVYLARSTRFDDDANLKSQPKYRVTSENYKAIGKAEEFEIEDTFLESDDLTFSGTDNGLVTMTESVGISLERFRFHIELHNRFATLEEEQTSPPTEEFQEEIPYYTLPKSHKINAKAIHYGTGASQRQKKLERDKKKSKLGIITIEKAMRDNSTEGAKTIQDLEHCYQQQIKDRGNFREFYYSKKRAKDQYTFELRKRKFIDKLCSQERKFLKNGKKSLIMFVGDRGTGVGSRLKGS

SEQ ID NO: 3541 - protein, 1080 aa, Mucor irregularis
MTAKGKTKRKPQTQAGPSTSKRTRSKPTQPEQPSPQASPSPSSPGSAPPSPPPPPDTTLKTQFVNRKCKLGPILRQDYSQYKNYFRTIAEEYSILRKDAINFTLLMLIQFFNTQQVENVRQYTTQIPVAQRSINRLNHYTRLADQLLAELLALLANIDQNIATGFENVTIALQNLRAPIDMRLNQLRPAILELNVIVQQMHTAITEENVDVALIDDLHNRLNHCVVNLRPQITAIQEHITQLLQNLRQIKTQLQNNLNTIVNGLPQEESTIVNNIFQTKDIRDRIENGRRTIQNRLDELRRGDMSEDEALLRAQLNTQMRIFIQNQQAVLTAYEQYQNLHQEAIQNNENIRQSLNLDTNIRQLHGIEDQNSSLFQLAEIASQQLSLAVANPEGNQFFPKVTDDTFWSHVYRRVAIDTDGLNRTIQFNQSIQRNFPDFEISRKIAGSEEYAYEIPALDPLHIAISMNYGSTVVQNVVMHFLNTRLWVVRIFKGYFLRQQHPPQQEQRPEEQQTRGPQRRTLPIMTLAKKAADSIVNHRLFNQIAFRDENDEEVLEELPVFDGLNELYNRVRFIYEAEFAGLTYDRVNEYNHASSHPLKYLRISYRLLQLATSLPDTPIKLWSLIPESSHSILHVPLSGAKAIYHLLKRAHSLNLQVPNNLTNVEAVFIRLTDFQDLYFGDNKRILWNTIFNIEKFESEGLQLGFGLQTDGNMISILFEKTALTFVPENKKELHMQKTRKNIINWTKGMYPLYKNPYGITMEDRIIGIDPGVRDIIYAVDCDADQLTNKQTTKAHSLSISNASYKVRSGMSWLKDKELNNRAATTIQLAYDRLTTRKTCSNEGIMTYLNSLSVERTEIFQFMKRWRHRENKGYAYSNRKMAFSYISRVVLGTTKVGEKFKLAHDSSKAFGENKGKRTVVAYGDASIRGTYKSNTPVPVKKIQRAIAEKAIVIPVDEFRTSVTCCHCQRRLNNVTAELNTCNHLKKKHRTIGVDKRFRTKCIDEEGNVLHLSSLCPDRRVVRRENVIYPLKLCNQCPVNGNNDLHWQRDVNAATNIRSILVEYVRSDYDIASRPAALSRGQQD

SEQ ID NO: 3542 - protein, 921 aa, Mucor irregularis
MTRSKKRKQITQYVGNTTLAPELRDDESENKRIGKRIKIMHEISYLPFFTRSMTEKLNSLIISKISKSDSKTLEKNIKKLKEYIINRKTLPPGLLQQASEYANEAILHQTGEQSTLTSAAYKNRLDNEVPRKLIDIWNEYATEDRFDTIVNQEKSRINVDIREQGSSSTASQGLHSSVSREEVLQYRTCPVSFEKIIRKDLPKAVNNALKAGTDKKTTATTGDLKKEDQPKKDETKKKKWPEKEEKPNEALDEFVKDATSARILAVRSVLKHMLLYDPSCTASLLKDRLYEATEKEIATIKLLFKFFKPYIPQKEDRLSIGHQLPLCILANDVLSILDYAKFVRKLFPVPKFSRLLALEVNSTALYQILTARPSPLKIADFDHFEIESVDFARSNAAAVMNSIFDLNLVNQVCESHRLVFANRIMVMPGLKTARLLGTRKDSKNSPEESSAPSLVDRILTNTSIVEEAKKEFNVLKREVDTLEGNMKTLQNDLKVLLKKNEPLELSAKIKEKKKERNDCEDQGLRGEMLAEMVLLKNKRFEEYRKIQASQKAVSDAKQSLHFRRMAMRYHHRLRRSAPATTDPEERPELSKNTIGLFKATEYKIKKPADFVFSGTDNGLVNMSTTTPFTLDRFKFHLKLYNRYQVLSEENVGSDEKDEEFFKLPKPSVINAADVDIGCGYRKVRLKLEREKKSSTSGKAVSDAEKELSKKPLNVNLTIPEYLENKEVHVGQSATIRNFYGSAKRATKSRTVEIQKQKFTNRLVSKEKESIKRTVGKRKIVQFVGDRGTGVGSRIKGFRKYGGKWLEVLRSYQNIVCITKEHNTSQLCIYCFEKLCHPRSSNKKISKGALQCVNPGCVSVKAGKAVKSRDALSSLAIGLSGLCSCLLGVTMPHFSPNKISQFDTDNFKNISLAFVKEEQDRQ

SEQ ID NO: 3543 - protein, 342 aa, Rhizomucor miehei
MSKILQRFEAKVYITEEKTEDYVTKAFVHRNVKECPLQFAKGTSTAGYCLGSALRLSRSFTKPLPETAMNQLSSLIEKTTQELKDGTFNLKSTPIPKEQGVYDSTCVQFPSQTHNDRFTSIRETTVAKWIEKSWDCIRTDGYDVEFIFKKPKKTPIPEVTPSMFRHLATDPQTVIWGVDLGFDKVFVAVEAEANTPYRIRQLTAEEYYDTCSYNKARHTRTKYLNEDPAMKLIADKISSLKTSSLANLTEALEYRFEHHKEICEVCDKDFRKKDANQAVPLDGNNQTQPATTKLKKWRRKASDDNPETDIGKATIIAYGKGTFSSSMEGKITAPTKCIFKAL

SEQ ID NO: 3544 - protein, 269 aa, Rhizomucor miehei
MQIPPRQVARRPPEADSSNSNSNSVRQMCILLWNKQPRHHPCRNTVLPVQQEDDHHVVDHRILYSTGGPCTDRRYIQQTAMTTMQRTRQNSPSPMLLPAAKASKRPSRGKTQTSAVNFVSYWTGRNSHAKGHHHGGSLSKLKATMDAQKEDALLVVDEFKSTKTYNFCFQPTVIHKYRHDGKFVSVKSALRCNNTDCPSRHLKLKQTTRSRDAAAAAAANIAVVGLPKALFADGKPLPVFRLGNTKDTRYNLAPHFQSSLHRNQSGYRL

SEQ ID NO: 3545 - protein, 487 aa, Rhizomucor miehei
MQRRMPDLQYGLARKIANEYVYENLAGGNPSVPEYLQDCSEDMRAAIMNAQEAIRNYIPEPYSSAEMSARPGPFIPALRFILQQYTADHMAAEQNEKSKTLPRLFSLTPKPSLHWRFIDIDAKTLASLNAQVFKTVFDFDQYRFFDSDDCLFTNLITTNGYQASIHFARPAKSPAVDLQLDDFEQNEIEEYFTPCALDPGRRDIFQAAYGAGDTPHEIRHCSTKEYYQLTGSPDRNKKLQNEKKRLGIEYIESSFPTAKTADIAQHKEYRAREELDEYDYKWWKEIQQEEEEEKKHEPRKRRDLTGLRLPIQPESAVRSTLQRENSESAAERKWKKAKFKTNTDGKLPLIAFGNGMFGKDNAPIKGYRSGLVNVLYRMLKRREARGELVVVTIDEYLTSQICHSCLTRNLKNVTTADGVYHHGLQRIMEERHYRKDIRVIHDRPRHQSGKWNTYRLQPLLPLLIDKSFALAGALHRKGQVCDIIVSL

SEQ ID NO: 3546 - protein, 398 aa, Rhizomucor miehei
MATEPSVFETKLAGSPSNVGKTMPQLPWRHPVKQGFATVGINRLRKATPVSIKDHSPQDYVSWAYVHRILLRWSSKRCLYLNQLLQSLKAAVRKAIDFDGSLTVLKMFARPLPSDIYTQVTKFIDETRKALEEKTFRPEKYTDPRGAQTFTIFPVYSFQPRHVTLYAQSSTKLLGINKVSVAAGGADGCHHNRKLSSKEYYDICGYNQINRNGAKYTRSKILKSSKLSPSVGARNIGLSRHNLVLHQRSRNGVRCLHLTRLMKNKTSNNCIWKQELRTKYARKSIGTNQTCKASIVPISPTSKVSWRNDEKFQYDELNHCFQSRCYICMVDEFLTSQICPECQQRSLKNKKHSANQSLHAVPKCNFCSMVWDRDHLGAINIRTIFVYMANHKDERPDT

SEQ ID NO: 3547 - protein, 373 aa, Rhizomucor miehei
MTDYDHTHEGNRALFERVFDPQKYKFLRETDKSLFTNQISTDGYAVHFQLAHATRKPSVQLELQDFSSAEIDRYYDVCALDPGRRHIFTAAYGCGDDAHEVRRVSRLEYSAFIAAKARNKHLVKLKKENGIEEIESNFPTAKTANVAQYRSYVQHFFQHEETLCQFYSHEQGETRFRNLQGRHRAREELANILINGGKKYNPKKRKHRSENRKKRKKYRQKRKRHRHARKCRRIPLQPVSAMRSTVNLSAEKEYKWTREKKIQRRKEKMPLIVFGDGMFGKDGTRLKGHESGVTNVLWKMLKQREARGEVALVTIDEYLTSQICHSCQERSLTKLKTEDNISHHGILSCQNCDMLWNRDINASKNMYFIARST

SEQ ID NO: 3548 - protein, 288 aa, Rhizomucor miehei
MNHSILKDEVAKSGNEFVYSGTDYGLCKMSASVALTNDRYQYHLDPYERFDVLADSVENEESGEMDVDEPIEPVDIEERKDFSKIEPHCITAEELNGKTLYNKIIKLRNNSNFSFETWEIRKQRPNLQSFYWNKRGRKDARTLRLQKEQVYDQVASQEQRYLRSAVTKITNLLVLKALALALVCAATLEKGGKWLWKRHMRYSTVVMTNEHRSSQTCSFCFSPVDRPHIPKIIKDKRRFVQQHRNSVCYNIDSITLFAEPARLPRTEMLLQGRISVCQEHRQSFKVVR

SEQ ID NO: 3549 - protein, 373 aa, Rhizomucor miehei
DNDTLFTNHINTDGMAVHFQFARATRKPSIQLEIGDFSSQEVDECFHVCAIDPGRQHIFTAAYGCCEEQHEMRRVSRAEYSAMIGAKARNKRLQTQKKENGIEAIESGFPTAKTTNIQPYNHYVQYLLVHETTLRQFYSRYHAHIRFPNLQGRNRVREELPNIVINGGKKYNRKKRKKRAANRKKRTNYRKKRKKYREQRRRSTGRIPSQPESAVRSTLINMQTQKEKRWSREKVPQRTKDKMPLVVFGDGMFGKDCNRIKGHESGVVGILWKMLKRREARGEIALVTINEYNTSQICHTCMSKSLQKLKTEDGISHHGILDCQTCGMLWNRDSNASKNMYFIARSIWEGSGRPEVFCRPNQSTTADVGPERV

SEQ ID NO: 3550 - protein, 385 aa, Rhizomucor miehei
MLRAYRNVIHAEADDLASLQAATDAINDERRSPVADNSVARKSFAMSSRMLLVYVHSHISVTVLYDSKARPQNHLLAYVKMAELCEEHSIKLFQSLPLRPFYFKLETTQLPFDLNMWKQVVDLKKRPFKNQGTDRSMAFQGNIYTDGLSVSIVKQNFQPGFDRKARQDKESDVDINVFIDPDRRDLLYCMHNNSKPDDRMVYRYTRNTKAKETKATQYRKLRQRIKSKEVKQCETRLSEHSSKTINIEKYKTYLEVRSEVAPILSEHYHLLVFRKLHIRSYTYMQRADDALTKRIKQQFGPNPVLIMGNWSNRSSVTARYHEPSGKCGTFTYAPKERLYAVLNRRIQAIEPLPTLHRSPWRSSSWSLIRRCTNGNDTLKSNAMDY

SEQ ID NO: 3551 - protein, 225 aa, Rhizomucor miehei
MSTEYRKLRQELKMKTEEVKKCEADLSAHSSTTVNVERFSTYLKARRDVTATLSRYYQSLTFRILRFRSYLYKNRADDRLVKEIKDRFEPNPALNVGNWSARASLMARYHESIRSIGLLRMLMKKGNLLDRRIQTSTLCPDCEHGLEKFKWARNPRPYRRKTTPQVKCHGLLRSAFFALYIFELGHSTCKDFFRCWNEDCTAVLSNHGNRCKETLGQGPRCCAKL

SEQ ID NO: 3552 - protein, 359 aa, Rhizomucor miehei
MRLHTGGIISRNPVFPPQVQNSRDVQAFADDTIDEIRILSPHDHFFGKDPFAVDVVRTETPWVVDSTQADAEPELSLEDFEPTEISEFFWVCAIDPGAKDLFTAAYGSGNVPHEIRTASTAEYYAIMGSKSRNHNLKKEKERQGIMQLESQTPTAKTVSLFQYTRYLRHMLQHRATESPGGSNQDPDHWRQKSITESTTQGVSVRTTSTAKGSLPKKWSWTKVDVNHNNKLSLVVFGTGMFQQGLRYRGYRRQVVKKLYNNLKRKEKVGEVLVLTIDKYLSSKVCNSCQTRNLYKLTTPEDNIIHHSILVCTNCAILWNRNVCASKNLFQIASSIWAGNGRPLPFPRSTSITTTNEGAS

SEQ ID NO: 3553 - protein, 982 aa, Rhizomucor miehei
MEDNKEQYRLLCKEADSLRKKLSSVLQDNDACRKAQERMEAQIYAQQQELAEAQKEIQLLTKQKRDLEKRLEIELHNYESDRLMWHQRETELCSELKRRAQDSWRNHGQPRRTRSATASNVWNRDNLAAEETRELMTDLYKWNEHRISALQVKDIKTRAQARLLADFAAQVEQQKRIIQDAILTTEAQASRVEELEKELFSVKQLNASLMEDNECYQTLLREKTMTGDFLKNVEEEDEEEGEEEGNQTTTLAAELGKTTSEMDSSLGNQNDTVTKLAEEVRILQESNKALTLYMNKILLKIVDNQELVDVLNIDVDEDEQQTYNKSNDRKQPQKQSTSVDSSVIKPTEQSNLSAQSNSRPRRSTISSWITAPKQSLATESPTIAVRHRSQTNAALSTSGGGGWANSALFEFVFRSSSTGVLNIPPPSMSRAGRPTPDSSRSQNASSPSSSPTSPSTTSNMEYVGPIRRNHTNNRNAHRFDPLSASSIPMSDRAFIEFTRCLYQAKTIVKELQTFSDSLCPGLRLSPFNGHSASSSLYDPRLASKEFVQQVYQYVGNTFQKFSRLCKVLLLILDKMEKAPHVRRERIDSFRTEVWEQVRIATDTKELLTSYIQHYVENNNLSPTSSSASTPVAGNRISNNAIPTSSSSISSNISTPSKFPITLKQSTIQFALVGYPNRCVKVNDGRLSNHNTCHRKKLPLDTRKVAHNVDVDEDEEENVEEDVDVDKRVTVMAITAELTAMELRISADGKEEPIAYQSNFSEEDIAGFDVVMDPSSENYRRDRIRTNGYDVQFMFKKPKKEQRDPLTPSQFKDVFKKDPIIWRVDPGINVVFVAADGGADDCHRIRKLSPKEYHDICGCNEANRTAAKYWEQDHQIKQIIDRIPSLKTASLDNLKKPVYPIESATTAAFVDSTIKILGRTIHLNTSQICLKCQQCSLKNKKDLGNQSLHAVLKCDSCSTVWDRDHLGAINIQDDLYLHGEPQR

SEQ ID NO: 3554 - protein, 213 aa, Rhizomucor miehei
MGRLIHLIESQLTVEEYYDICGYNKARQTRTKYLIEDPGMKLIVDKIPSLKTSSLASLTEALEYRFKHHKEICEVYDKNFRLKSYGNKRNGLSELACYLLGGSKKYANQAVPLDGNNQTQPAMTKLQKWRRKPPNDNPETDTGKAIIIAYGNGTFSDSMKGKITGPTKCIFKALRSRVKRMKWPVIIVKTDEYLTSKICPKWCQKMVENAKEI

SEQ ID NO: 3555 - protein, 563 aa, Rhizomucor miehei
MQFGKEHERFTRAVPFDNAVKAEHRQRLKQAACRMSSWLSHMMLRAAVVVNGYFIWQGQNGIPTYMFSQNFCDILSAACQEMATVYTNNIVENFQPRVVAYIQHKLDSFVPEMLSKEELKKISNDYIYEWIAGGEPAELDIFAEAPLELILAVQEIKDLLMPLAPRPWTTKSMSATPGAFVPVLYAILQDDNDTLFTNHINTDGMAVHFQFARATRKPSIQLEIGDFSSQEVDECFHVCAIDPGRQHIFTAAYGCCEEQHEMRRVSRAEYSAMIGAKARNKRLQTQKKENGIEAIESGFPTAKTTNIQPYNHYVQYLLVHETTLRQFYSRYHAHIRFPNLQGRNRVREELPNIVINGGKKYNRKKRKKRAANRKKRTNYRKKRKKYREQRRRSTGRIPSQPESAVRSTLINMQTQKEKRWSREKVPQRTKDKMPLVVFGDGMFGKDCNRIKGHESGVVGILWKMLKRREARGEIALVTINEYNTSQICHTCMSKSLQKLKTEDGISHHGILDCQTCGMLWNRDSNASKNMYFIARSIWEGSGRPEVFCRPNQSTTADVGPERV

SEQ ID NO: 3556 - protein, 309 aa, Rhizomucor miehei
MTHILQKPKNTALDLKMWKQVVNDKSKPFKSQGPDKSMAFKGTIFTDGFGVSIVKQTSDTKEFRYISQLDQAALKQIQPRAVFIDPGRRDLMYCMHQDTYLKARRDVTATLSRYYQSLIFRKLRFRSYLCKNRADDRLVKEIKDKFGPNPAFIISNWSTRASLMAGYHEPIRSIGLLRMLKKKGFQVDLIDEFKTSSLCQDCEIDLEKFKWVRNPRPYRRKTIPEVKCHGLLRSAFRAPYICDVGYSIYKVVFRCSNEDCIAVLSNQGNTGARRLWNRDLAAVLNFRHIMNGLCETRKIPTRFQRSSNQ

SEQ ID NO: 3557 - protein, 356 aa, Rhizomucor miehei
MGTLESKRIDEGRKYGKLMAARKAVDDLYLDNLRKRNETQKICVKTCTLPTTRRESNHGSKKRRKSTGIWKRQKLCSSSTSSRKKLQRSSLLTSWVVTLTPSSLPPPPNKLSNKSSIVFGDTNRRSSTMTLQSSSRYLSRSPCLHGKWKQAATFERHHPKWREAFKAKNGGSSAEDTRKREKESRTREIRKDVFHREFATQPRASNSRSTVHFFGSWRSSNNKIRGAHTRLQRITQTLCKSRKNEAFITTDEYNTSNTCNYCLRPIVLHKYLRDDGKLKRVKCQNPQCPSRSLQYMTRNRDKVGATNIAILGIQGAFPTMACLYRHSEDENNPAQEFTPKWIATSSGSAFQPRNDG

SEQ ID NO: 3558 - protein, 482 aa, Rhizomucor miehei
MKSFPFYVVMGIPFLCRYASSAAAGTPPPPGGKPGGGSAAAWYLYKKSQETRKYPATFTRSIEDKVEQLGKDSQKTYDEARDKAQDNKEEAQGYVESAKAKVGEQIDKGKEAVGDQAALARSYVDAAKTKESLHFHITKGGSNPFLCDQLLSASEVDMCTSIYCHVPATDGAGLSVIKQTHETVARASIQDRAPPPPPQSRYVTDLLRGDSTPEEPVKLRYTQNERQKTSNARKYRQQGCGELNNENDVLAVRARQRLNFLSQTNSKSNHVNAFEIYMQTAARAHNDLLAFFGQLKNFWRQRRCGDWQLGWCTPAIPRTPQRQNPRPWRDDDMVVHGLLGCTNRTCYVSRDGQARTRYWNRDLLSTLNIIHIVRWMREHPEDEEHRRPPIFRRGQQALEPINLPLQNWTTIASSQISVHTKQPVSSVSSSVSFKVPRSLTPEQLPFAYIELRRYRIDVNGSLLAKVHDAYTHAKLKCVYISA

SEQ ID NO: 3559 - protein, 444 aa, Rhizomucor miehei
MDFAARRSPFSVEESKQNAVNXXXXXXXXXXXXXXXXXXXXXXXXXXXXXXXXXXXXXXXXXXXXXXXXIGFTDVFITTFLQNLGDFLPDADPEIVDSIQSDFESHEGSSIEFLFDIKEKATVAKGNRVQVIKRDYDRKLRKTIQDTDGNEVKRFVCANRFTTDGILCNAYYRDWCTPAKKDKKLDLPDVSTMFGRTDIGGVIGVDFGQTYTAAAFYLPIADADEDQECAQVDIKRNELNGRQKLNSSILEQHKARDPALLKKEELMSKGSKRGIGPEFLQYCRGWQSSEGQSSFYDKGAIKRLSWDTKRSSQSKIDKAADLILGMIPKDTSKSTLICFGLDGVSAPTARGAPSSMETRLAKRIMDKAKASSKDIIVTRTSEYNTSQVCPRCLGQTIIARDAIKFGTRPKCFTPDAKTKKPARKKGTKTKQQQPSQNKTTKKQQ

SEQ ID NO: 3560 - protein, 268 aa, Rhizomucor miehei
MYNASIHTSSDVAKYITSCGYRCAYLPSYCPELNPIEQFWSVVKSKVKRNMFLEKETLTTRITEATESLKPSDYEVGWDSGEACPISAIFVPSNEKRKGLVWAHEARIKAAEEKPPANCKKSNFDKLRLYIRAWQEEGRGISIQNFCTKPSVMHKGWDTRMSMQAEIDKAVQQIVNLSKSVLPRTEKRPVLFAFGMDGMLKANHHRKGALPSLDFKLTQSLYSYLQGTPHTRCRIDDYNSSKICCLCLKKGKISNVSVLEKPACQTIY

SEQ ID NO: 3561 - protein, 499 aa, Rhizomucor miehei
MRSRRTLYPGFKTVRQPQAEYRRDPCRANRQGKVTTRTSLVVSRYVVENGQAAIPTYIFSQSFWYSLVSFLLEPHCPAVSRLRYPLENVTGYSDILSTACTEISTGYTNHITENLQNKVESFIQHQLNKFVPSILSKKQVQQIANEYLYEVIAEGQLVELDFLEEAPLELVIAMQEIKYFLMPSAPRPWTTRETSANPGFFISVLYAILREFEKNMWQRETRKNAPRLYLLTPRLSFKWRFTTLNAKTLRSLLGISIRQTIILWMDAAKNRKKSRELVGRSTAHDWRQTRNKSLQNVTKGNRHRDDRVKIPNVEDGQRLANDMKRHDSKITRTPQGSRGTRKRLKQWWKKLQLQETIPSQPISALCSTLNIPPEKESKWERKKEIQIHKGKISLILLGDGMFSKDGNKIKGHERGVVGVLRKMLKRKEARGEIAVGKIDEYLTSQICHSSLDRKLRKLTTEDRISHHGILECQSCVSGKDLSAQSLLLDLQQINPLLRT

SEQ ID NO: 3562 - protein, 352 aa, Rhizomucor miehei
MVLRVLFAMFCADILISARNRPAIGFTDVFITTFLQNLGDFLPDADPEIVDSIQSDFESHEGSSIEFLFDIKEKATVAKGNRVQVIKRDYDRKLRKTIQDTDGNEVKRFVCANRFTTDGILCNAYYRDWCTPAKKDKKLDLPDVSTMFGRTDIGGVIGVDFGQTYTAAAFYLPIADADEDQECAQVDIKRNELNGRQKLNSSILEQHKARDPALLKKEELMSKGSKRGIGPEFLQYCRGWQSSEGQSSFYDKGAIKRLSWDTKRSSQSKIDKAADLILGMIPKDTSKSTLICFGLDGVSAPTARGAPSSMETRLAKRIMDKAKASSKDIIVTRTSEYNTSQVCPRCLGQTMP

SEQ ID NO: 3563 - protein, 459 aa, Eremothecium coryli
MPIFPNKKRQTTWKNKLVLQQGNELKKEQLNIPSWTSFKLIDHGQDANDQVLIPKIPSKVDPCSAPKDLWRPKTIRIYPTMKQKEILLLWLTATRHMYNLAVAERIKLGQIAKENGTKVKLKLKHLREVTPLKKSYDYSKDEKLSYLKDVPFLIKDNGLRDFDKDYRTNLAKSKISQKPFKIHFKRAKDKQSMTVEKKVWGLSRGIFHEVFSSTVLRGTEALPEKLPHDSRLVREYGKWFLVIPFGAEGQQPKAEQPINAVAVDPGVRTFLTTYDSSQKVLEIGEDGYLKLQHLDRRLRSIQSDIHKLKSKCTLSKVDRKRKIRNRRKVATRLYHRKKNLANDIHRKASTLLASKYNYILIPVLNFHNFKKTNRRVKANLANMKHCLFVQRLKNKAQHYENTTVIEVDEEFTTKTCSSCGVRTNIGASKIFKCSNCESVFDRDHNAAKNILLKYLGEIE

SEQ ID NO: 3564 - protein, 387 aa, Belgica antarctica
MISSTQTKTARKLTKTLVTRKNLARKTAKPRANTGKPKKGEGEKKGLPPKKRTLNDHPAYEYRDRVIKICLGGFFRNSFTQKILQPNDTAAVKQGLHLPSTKGLSKIAQAAAVQYGVNKLTNLTTHMRKRFSLFYQFIHTSKLTKKEADXXXXLTSFSTAKNMIQGPADEXXXXTDGISVSILIRKRPHQGAFTFRAGLDPGYRYMYSAVIFDEPTMTWQRNILLRSSKHQHEAGEPARRKKLQKITGRIEEKVHLQTIRRLQQIQEAYENDGTVLNTERELVALELGYADEKFIATLRNELCRLSFNQYWQKRKTIDGNVSGFFPNRGTLLMCYGAGINSQTVIKKGINSLERHPKITVKYVDEFRTSKICCYCLEQLKVSKCPMR

SEQ ID NO: 3565 - protein, 294 aa, Belgica antarctica
MFKIENFLKVDADGAMKQRFGLSIKTDGISVSILIRKRVTIKSHQGAFTSRAGLDPGCRYMYGAVIFDEPTMTWQRNILLRSSKHHHEAGEPTRRKKLQNITGRIEEKVHLQTIGRLQQIQEAYGNDGTVLNTERELVALKLGYADEKFIATLRNELCRLRFNQYWQKRKTLDGMYLALFRTVQFSFRYKKPPLQDLINSLERHPNITVKYVDEFRTSKKCCYCLEQLKVSKCPMRYVNCPACHRTNNRDINAAQNIMQDAFNPAPIFIRPAXXXXHLPGNFVQKVRQASAPLP

SEQ ID NO: 3566 - protein, 588 aa, Coccomyxa sp.
MEFGDRPPDPGLPHYKTLKTSLASVLKVPEKQQVISQAAATMNGIVIRGLLLLRLFLIHRIGTPPAVDTVLVETCLKVVCVRKATGRPPTTGRALRDELTTFYTQHFEPLLPEGDQQPSYTHLNTVLAYAAVQVVAAFETNVKEHFVEYVEAYVDALWHKDYLVQRIRATRKTKRDREAGVRKLCTTLRQLKNDLLGVGSEPLQSHPSYHAWVRQHRAVVLPAKQRYEKDLLKYDLQCAPQDYWPGMLRMTRAMEQTGKKIRNFCPLRTSVIPRHICLDTTVLVHLLFTEANGPKEKMLRKGELVRNKDKIWSLFFRTDQRAFSAKDYRFNNMVYTDGVACSILLIRRDLYGKKCSKGKPAVVASERYIDDLSSDEKARLRIRTVVGIDPNMSDLLYCVDENASKHYRYTQNQRRRETKAKKYRDIVLKERTHTRIQNRTVAEWESDLSAYNHKQVDSAGFKAYVRAKLLVNSKVTAFYEERVYRKLRLNTFYNIRKSEQRLTQRFKEVFGTPDEVVIGIGDWEQSKHRKYKEPTKGKGFRSLLRRAGYPVFLVDEFRTSCQCSHCQSEGGKCEKFRVDERAPEGGAF

SEQ ID NO: 3567 - protein, 732 aa, Coccomyxa sp.
MDELRGELVLKTRLRHLLSDRGKLHRLRDAVARVDRIVHDAYIFLKLLYCDAFEIALRSREWDATLWVSLPPVTSPDFINDCLKTCSTSLTATGKKQGGAYGPTKSDHMARLRAFHERLQAEGLMPERHSSLHLAHVLYYSKIEMATALSNNVVMRYASYVYRFVNTRLLPMELRRLGVQSLTALPTSVRADVLSGINAVKKDVETRRDPKLSPVRFHAWIDQHVDDLVRPKPSGAGNDWNAFDYLEDDIPRCLSYMVHINRLLEDDGQRLFSPLCLRMSWTPGHIRLDTAAMAEILLEDADEVSRIRTDLSLTSVPETALTWDLPELKRKESLQWSLKKLCTPELYKRLQGDEQRNSALLKTEYWRSICRLDTNRHNRSLYKGRVFNNMIDTDGYAVSMHFVPPHLHGATAYNGGKVASKRTSKNAKARKRVKREWPYVHELSKDERAELLRDERLLAGVDPGKRDLVTVCDAVRGPKVRYSAVQRRWELFSKRHREQRLRLLRSAVPEDCRFHDLRRMFDPGGTRVTTYEGLQALLTETTSRSSRYDVFARYVARRQAILQHMKRLFSANSFRAAKYRTHVAERSSEAKLVSRIEKAFPQGDPVLMYGNWGRDPNLRNSAPTPGVGLRRRLSRRFRTVTVDEHLTSSVCASCHTKKVAHPIGRSYTRGGRRHDRPLHSLLRCQNEMCSSKWWARDVMGAVNILCNGRHVLRHGAGHRAFRRQSRGGNEGF

SEQ ID NO: 3568 - protein, 689 aa, Coccomyxa sp.
MHNGGHRTADPPSLLCHLSEVLLGILIENLGASGSGERNLADTKEMRRPKKPPKDPQLRLQEQYLVYAKNKLFKEKKVKEKAVREDVKERAVTNAHSTFTVVKTTWRSLCKRAARLLDLETALREVNTTIAEAYLLANVHVVRLCTAGIPLCKLNQSFFYQCLSAVSVSEREKPEIEDFELRMSVKLYRSWRPQGYQPPDSTNLSSGFHQQASRQMATNMRNSTVANFYRRFKRYLKLRYSLDGKQAYEALLAIRAAEYEGEDPLVKRYRDMLPPKPEKSRLEDNPELVMPLQHHFLRAFEAAQADQQAEKPPRLFSLVPTKQGFECSHIKICSSGLYGLLRRSGIKDLPSSKGFPGKADAFWRRFFHISKFETTNRRFAGEILTDGKGVSIVLRKPKVEPAAKGAPLDPDTFGEVWGLDPGRREMFVASNDAQRVQRVTTRQFYHDAKYRESNAKIRVWQDHDPDILEAIRNMPSKKHSHLEGLQAYVSYLLPMLDFLLRWHMCKAFRDLKFKRYVFAKKVLRTICQNLTREAGQNTLVGFGDWSNQDSAGIIKKSPAGPVKRLENELRRHCRVVSVDEHLTSKLHSCCHHRMKQMYQRRVCRDGVMRSVKVHSVLHCDNNGCHGMTVNRDVNASRNILHILRATAGGGPRPEAFHRSRTKYSEAPATSGLPLNGQSTLALLPVPDSH

SEQ ID NO: 3569 - protein, 868 aa, Coccomyxa sp.
MEFGDRPPDPGLPQYKTVKTSLASVLKLRCKQPVIAEAACTINKVVIRSLLFLRLYLIHHRDDPPVVDAQFVDTVFKTVCLVKAVGRPPSTTKALRETLSAFYRQHFVPLLPAGDQPPSFTHLNVVLDYASVQVMTTFETNIKQHFVEYVESYVNSVWEKDYIVERIRATRKTKRERESAVRKLIATLRLLKQDLLNVEQDVVFKSHHSYHEWIRQHRAIVLPGKQEYAKGLLKYDLQCKPQDYWPAMLRMTDAMERNGKRVRNFCPLRTSAVPRHITLDTNTLVHLLYTEEFGKKSEMLTKGELVRNKDRIWKLFFRTDKRAFETRHYRFNHMVNTDGVSCSVLLIRRDLYGKKSSRGKPAVVASEKYIDDLSADERARLRTKKVVGIDPNMSDLLYCVDEDASHHYRYTQNQRRRETKAKKYREIVLKERNHTRIQGRTVAEWESDLSAHNHKLVDSERFKSYVRAKLLVNSKVTAFYEDRIYRKLGLNTFYNTRRSEQRLLQRFREQFGAPDEVVVGIGDWEQSKHRRYKEPTKGKGFRSLLRKAGYPVYLVDEFRTSCQCSHCQTEGAKCEKFRVNVEKELIPWGLSVTNANVSELRDMPGEENKYFASLQMKAISGATNDARVEVAEAKKRGDIGTATRDGEASVETTRINAANVTARNARQQEIERSNNQLRLVKLECEQEQAVRQKEAQMAPMNREAILQTELNKLDAMKQLEFLRSTQFAKATVEAESLAKVAEGRATATKLEADADLYKAQKEAEAILAKAQAQAEGLQRFMDTAEPDLVKFYLGLERNLFVDMAQKTAQAVQGLNPKINIWNTGASGESDAMSPLRNLFTSIPPMLDAVQTQTGVRMPSWMPQQATEA

SEQ ID NO: 3570 - protein, 732 aa, Coccomyxa sp.
MDELRGELVLKTRLRHLLSDRVKLRRLRDAVARVDRIVHDAYIFLKLLYCDAFEVALGSREWDATFWVSLPPVTSPDFINDCLKTCSTSLTATGKKQGRAYAPAKADHMARLLAFHERLRAEGLMPERHSSLHLTHVLEYSKTEMATALSNNVCMRYASYVYRFVNTRLLPLELRRLGVSSLSALPQNQRAEVLGGINAVKRDIETRRYPKLSPERFHTWVDRHVDDLVRPKPSGAGDAWNAFDLLEDDVPRCLSYMVHINRLLEDDGQRLFSPLCLRTSWTPGHICLDTAAMAEILVGGADEVQRIRADLRLTPVPGTALTWDLPELKRKESLQYSLNRVCPTELYKRLQGDEQRNSALLKTEYWRSICRLDTNCHNRSRYKGRVFNNMIDTDGYACSMHFVPPDLHGATAYNGGKVTSKRTSKSAKARKQVRREWPYVHELSEDERAELLRDERLLAGVDPGKRDLVTVCDGARGPKVRYSAVQRRWELFNKRHREQRHRLLRSAVPEDCHFHDMRRLFDPGGTRVTTYEGLQALLTETTSRSCRYGVFARYVARRQAILQHMKRLFSANSFRAAKYRTHVAERSSEAKLVSRIEKAFPQGDPVLMYGNWGRDPNLRNSAPTPGVGLRRRLSRRFRTVTVDEHLTSSVCASCHTKKVAHPIGRSYTRGGRRHDRPLHSLLRCQNEMCSSKWWARDVMGAVNILCNGRHVLRHGAGHRAFRRQSRGGNEGF

SEQ ID NO: 3571 - protein, 553 aa, Coccomyxa sp.
MHLCRHHLACQNDAYNXSLFDVVPTKSAVEADPRIPLRAMHTVLRHFEGAEACRGTRLFTILPTKQGFRCSHIKIGNAALHDILVSAGVERDPDFMERKRLYWSRLFDVERFERSGKSFGYEIVTDGRAVSVLLTRPRLSPKVKKTQKKVKKREDPAYDCTGIDLDSYSRVLGLDPGRRDGARVAKPPSGALGWTTRRSLVSKFEGETLKSSMWCMAPHICHLFVATDGDGDVTRCSSRRYYHEAGFTRTQRTMRTWYDQDLQVQSWLRTMTSAKTGSVRMLLEHFRNLFPKIDPLLDFHLGRKFRDKRFTRFCGSKRVIHRLCKAITKGDGEKTLVGFGDWSNIDTGGFIQGAPAGPVNPLKRELRRHCKVVSVDEHLTSKLCQFCASGTFFTGERSLMDTSSRLSIDRDRGDISYAFDPYDPGGNILVNRTGHHIQHAENGGEYRFPEMHKRKADGFDEITNTVYEYNGSLFHGDPRRYPADQPHPLIVKKTCGEVYQKTLDRDRWIRDQGYTLVTMWEMDWDVGVKAVIRLQRLWRQRKGISNGRKKVRS

SEQ ID NO: 3572 - protein, 335 aa, Parasitella parasitica
MENEPSTVASKGFVYRKLQEIQFVQSLNRKRFRSLQEEKVLQSINSSETFVPGKKLSSLTLQQISILQQFIDTVKARIEDRTFFPAKYTDPRGYRFFSIAPVYSAQNKAIQIDAQALWSNVITTDGYSIYFHFIRAVKKKTEGYVEKKPSDFINDIQLGCQIFAIDPGIRDITTAVDQSGRERKTSLNEYYHLCGFNTASTQREEHKKQHMNEYQQISILSSFKTTNLDDSVKACKERFDLYDNIKKYYDSDNRSSKLRFKCYIKKQKCVDEICRRLTFGSSKYGQKSKMAAKKQKTTYVPPSPIDDAKPRKTILALGNAIFNGNLRGNKASPVR

SEQ ID NO: 3573 - protein, 231 aa, Parasitella parasitica
MKCLSSDDLEKIKTFIAATQKKIQDKTFKPLTAADFCENIKNDQVHFGVLILALPISTLLLILVMLIKLNLKSYIKKQNATHEIAKSLFQENKATDPSVKTRIIVYGNASFGTSMKGKLPAPIKRITEAVKKLSKDSKGTYFIYVDEYLTSQACNKYKQQKFANLNAAGSKRKVHAVLKCNSCNTVWNRDVMASKNSYYIMLHMSQHNNERPPEFAKPSGTTESITCMRSP

SEQ ID NO: 3574 - protein, 551 aa, Sporisorium scitamineum
MSLVTLTNIPRDDLGIGRGPDIYPFHDANLAQHYQYLIPPSEEVLAMVDPNRPANTALERCWVHTTTSTFSYPGLTNETYIPVFWPFASTTVIERDTAMFSSDRGLLEPADLGDQVEAALANLTEPSPATATAAAATTATNTITTAASVAKPPITNLRTRKYRLKLPTKLKEIMREWSRCANVSFNEALRHVNHIERHSDARRALITYYHNLPAHSRAAYIDTISPATKAKDMQRGFTLFFAKNSGSIQFRMEGENIVDMKFQIAPVCATRAGVNSIKYEIRHEWGIQLDRYGQWHLLFPFDIPAPTLQAREHFFEGPITVKSADPGVTTPLSVWDSSNGTAIDIGCVEDGARPEKLRGQDDKLKSRRSQRQPLPPSPLPPHTPVPVTPFALSSSEGRKLLKRSKRVCKRIHNLVSDLHCRAANFLASSSDVIIMPRMEVRQMIRHRRGQSLARSTRQKLLGWGHIAFLNRLAVKCFDVSVNERYNKARPTVLLVQPEAYTSKTCGTCGELNHSLGSSCRFNCANCCYIADHDYNGAYSMLLKAIKRGSTG

SEQ ID NO: 3575 - protein, 235 aa, Arabis nordmanniana
MVRIKQHREIPQGHIIKSCTISMTPTGKYYVSILTEYEKEIVQKEVETVVGLDFAMDQLYVSSEDERANYPKFYREILDRLAKAQRVLSRRTKGSGRWNKQRIRVAKLHEKVANQRKNFLHHKSKELATHFDVVAIEDLNMKGISQALHFGKSVADNAWGMFTSFLAYKLNEQGKQLVKIDKWFPSTKTCSSCGNVKNMSLSERVYSCICGVNLDRDYNAAINIKNEAIRLLALA

SEQ ID NO: 3576 - protein, 329 aa, Heliconius ismenius
MWIKAVYAKSTKHAIMETEKAFRNFFQGKANFPKFKKKKHQDVSMYFVKNDKKTIIRCERHRIKVPSLNWVKLKEKGYIPKHDDKHSIKSGTISQQANRYYLSVIVEQDCTAQVLNDTPTEGVGIDLGLKDFAILSTGKTYKNINKSGKIRKIEKQLKRQQRKLSRKYESEKKRVNEKQSKRGEATRKNVEKQVLKVQKLHKRLTDIRRDRVNKIVSELVKTKPAYITIEDLNVKGMIKNRHLSKAVREQSFYAFRKKLADKCKVSTIELRLADRFYPSSKLCHECGHKKVALKLSERTYRCENCGYVADRDYNASMNLKDVKEYNVIA

SEQ ID NO: 3577 - protein, 386 aa, Heliconius ismenius
MKLMERLKAYKFRIYPTEEQEIFFAKSFGCVRKVYNLMLDDRKKAYQEVKNDPSKKMNFPTPAKYKEEFPFLKEVDSLALANAQLNLDKAYKNLFRDKSVGFPRFKSKKNPVQSYTTNNQNGTVSLIDHKFVKVPKLKSLIKIKLHRRPKGMIKSATISRHSSGKYYISLLCKEEICELPQTNSAIGIDLGITDFAIFSTGQKIDNNKFTSKMAKKLKREQRKLSRRALLAKQRGFNLFEAKNYQKQKRLVARLHEKVMNQRNDFLNQLSTEMIKNHDIICIEDLNTKGMLRNHKLAKNISDVSWSSFVKKLQYKADWYGRKMIKVDQWFPSSQICSKCGQKDGKKSLEIREWTCPLCHAHHDRNINASINILTEGLRIKSLTEIT

SEQ ID NO: 3578 - protein, 1059 aa, Gonapodya prolifera
MTPDNFAHHLRIEQIPLSWFLPLAKGWRRDECNLVRKHLFAVVCVQMQTALNLASVPHAYHVVLKRWLTDRLLTQEADFFGEPKYRGVPLVINLVLKRTLAQHIARVKTDLGLTNNLPLWKKVENHLHRYIPVLRRASKLYNSTVHVVAGHGAAIRAAKGAISLSFKSFVRGSNEDGRGKVFDRSGKLLERVAGFLGWELARFVAETTRPTTSNNFSQLVDTLSQDLADRARLCFVLVEEGGLFAMQPPVEQPVGEPMPLYLEEVCKRMMAVARRDNPTKKTTKQKRNTTIYGGDINNLRERLRRAVFDVVTASVRSKASRATYRLLTTAAVVALRAFRAHSEGRQLEPAFASRTVNETSSMEDPKLARSVQRLCSPERMGSLAADIDWILATFANRGVSADTLMDGSRPGWEDLAVLSSTRRLPAQTVDVDGISRTGILLIQGCCEFDVVDLQGCGQRLASFDPKRRGQLQKIHRTVCAAVMRDVLASTDSFASRRAVLDTFGSGKHLISDDRRLDLQNFVRQLRVLVDPTRQQVDSEDVLDEASASSESGRDLQPTENLAPLDRDVNKKTRKKKERKDRFAVAPDPGNGVGALRIDSVTELWMLKKTAYFQNLSAGMYAAYKGILRSYLWNCGKLATNTHLPGSDTAPRPFKSVVVTNAEWQITFANRESSAVARAPPDATDTDFDCPSKKVPQHRYHPSSTLRPQERQMHALGRPTTASREMIFYFDPNRGSVNHKHNRPTVGLDLLPETATGRSAGRTNKKWAVERNVRYMDTGRAADDQEITNPKSRDVEVHGRITTRGFHHNRGHHYARWVADVMRTLSRMGDSASMDDAAVQLRTGQKKAEGWKTVKKAILLEDERTQTLPRGDTSASGQPRVEAWDSGATLRRAVGEGTMREYVRAVSRDWTWRRLFADNNIFHELKFRTYSQSQRVVMETVRKHVLAPVKETIRSGIPVNTVTLVYGGASFNPTSRGXXXSVDRRIRDALQNLAGPHTVKWKTVDGTVHTHTFTVVFELLEEYHTSALCSCCXGFLEPITVKNFEKRDTGKDGLLHCTID

SEQ ID NO: 3579 - protein, 432 aa, Mucor circinelloides
MAWNLPVLPGFKAVRLYGEVTFTRRNTNTSESANAEIDWMEDQDNDEMLKELKSRKAAFEQLLKDATKELNKCLVENNSVRSEKRQWKENPDDRDMHYHRVHYLKLMKRGLMLNVRNAKEQLQATKREIYEHRHPASTTSSSPIIVNSEEPCLQDPIDMDDAWESGCRQLPPTLTLGPKEINQQSGLATYTASLVKKKKRTTLGHQVLQSEQFLSECSLHQSANTNELDSNYREHEQCREPIRSLYYSNSQCKKGRRLELSKTKHHDRVAASERKSSNHKKPIMFVGDRGHGVGSRIKGHQRFGGAWKQELHGRYTPTLITNEYNSLQTCLFCFHKLSHPMVAIKDKVKATNGSFVCLNAQCPNAYTVVCRGQVSALAIGLAGLASLLFGVTFPCFDEHPNRVKRDEFNQSALSFLHRKQLQDSPIDDGNTF

SEQ ID NO: 3580 - protein, 286 aa, Mucor circinelloides
MFLNGLYTDGYTYRVLFARRVLPSSPEDNIRLELDDFSREEVNKHFRPCTVDPGRRHPFVCYHGGTDIRRLPSIKYYNMGGSVTRMKKQHKYKQELGIEKIETDIPLPKTASVEQFVLYVAYMLQHMNTFFDFYGFDTSKVKWLNYLSSQQVIEESVNILINGGKKYNKGDKSKMPLVVFGDGLKNKDHIKFRGLRHGVSNKICNNCLKEDLENLKISHDNKETKIHQILKCKTCNIYWNRDAMASKNMHTIATSIWCGNGRPQVFKRHTATSNVVVVAHSGESAT

SEQ ID NO: 3581 - protein, 591 aa, Mucor circinelloides
CKFESLKLFVNYYVLENHALTGAPKVIFSQNFWYSIIQMLNGKRPTNSASLPQQQLLNSFDQFKRQHRSILYTEKXLPGISQCVTEACKELATSYTNNIVENFENHLLYXLRYKLQGLFMFMPKKIIGEVAKKYCYQEICKGSPTWPNTELLDNEAKSTTIQNFCEPWKNMISKPITQVELSANLGNFIPFLMSLNAELEQEXIDHKPYDVRKLPLPRRFCILPKPSFHWRFVTISVNALSCFVELSLPRGYQAQLEMFFLIFKFKKLRFNDITELTPNGNNSILFGNIVRTDGVSVDFLFYRKHQVGPGPSYQRFDMALEDFDLSDVKDKYLPISLDPGRKSVFTATVGLQSNRHVRCTTKEYYHMTGSTRFSRKQNKLKKDTGIESLESEIPSPKTSKSSAYSDYVKYMLXNKDSFFGFYGKDTAKXRFQLYRGVQRATDQMANILIHGTSKKQKWKPAPYLKSKTKIPLIVFGAGMFGKDAVKLKGHRCGVVGKLFRTLKRHETKGRLIVTTIDQFKTSKTCNLCLSDGLTIINTDKFKGVGVVCCHHCKQLWQRDINASNNMMTISKAVWSGQGRPQVFTPERNTSP

SEQ ID NO: 3582 - protein, 964 aa, Mucor circinelloides
MRIKTRHIDIFTPGETNINAAASLQKPQGRHSAEKHTESGKKRYMGALKRQFRFRLRSEINKCNQDKNKDFGGLLKLLLAAKRLPKGNEEEEEAEEEEEEYQDIQQRTCSASLSSIIRKDLPPAIRQAFMDTINITIVQVSNYMAEFSKQVLNIALLFNDHAFSKQNRRIALVPQEGISLDPVLPVGNLDYTVRVPKPVDADCLKDPDFCSKYSQLFQLPHLELILSTYYGALGVQESSLKATPLHREIVEAVPRDDPSPYEALSSHAMKMARQLYDIEEQLVQDEIKAEKSQDISKRRLRKLVQVARSALFHNDVISQAYIEKNLEQATEKEIDVISRIVVFVKPYIPPKVNYRSFAFQLPFVLMANQVLRSIGRESQVVKITPIVSPTSLKALVIDTATLFSLFCSKDATSKMYLQDYSGRLIQAKSALYHKDAVLGSFFNMQKLHSLAKDYGMEFNHRMHILPGLKTVRISGIVSIMRTKPKTLEPAKAENQDMPSDENEHDDETLAKLNDRKTALEKLLRDTTKELHQFLVENGSVRSQRKEWKQKPDERQDIGSKRDNLKVETRERMTRVCDAREQLQAARRAIYEHRHPNTVPATNPIIIDSKPSLHKAEECELSGRVSLTNAVFAGTDNGLIKTTETVFFDIERFALHLELYRHFHISEDPMDIDDIVPSTCLNLPETHTMGSKQIAQQTGLTSYISSLVSKKKRTAAGHQVMEAEGLLSGCSIHQPTTAEELDRNYQVHEQCRNSVRSFYYSNNQCKRRRHLELSKRRARDRIAAAEQKASGFKEGGKALVMFVGDRGHGVGSHIKGHQRFGGSIANMGSFVDFLDVLLLLTAKLEKCAMDITSAVEELENRRSSIGIAFSRNRSLLQGKRRDAWMRPTYYSPPRDAAADAKLPVHLFGLDKDDSDAHSEEDVEDNQASDASDTNADQFGWVYQDGAWRNVFVKESGVDTHRPDEE

SEQ ID NO: 3583 - protein, 594 aa, Mucor circinelloides
MKGKRERDDQDDDPKPMFGLLMGKRKRPTLYLSKSKYKQRPSSTLPHTIEARAASEATSSETSAVLSPVIVDDESDKEEEDALITNSPDLTAKEIRALVAICCALCQAPEYPDGVTSQDIKQKLYHDKQESIPAHCLDTGARLINAVRRITPKKDQNFLVASWCQMRTLRNILVVFAGRRTKRNPVKLTIVKQKDNDDQHAVRIDSGALYHLFSSDYDLYQSNGADKFTSVSVVKTEEQKLNLFNNFFRSKEADKQAVKTLNDEIKASRQTYTALAKQLKQLELARMAAGNKSRVFERKHKRRDPRLYGDLVAARKAFNNVHKEQSNLLHVIQERHSRMYLLNKKVNGQSAPSKGRLTDANIRHIVAEPTTIIQGIVTVASGMATSPASLFSAVNRFQAISDEAMVPHPRDKEHRFSLTVSKVNTAVMSNQDDRKVKRRCRLKKYHQRKVVSDKALNCQPKGSFTVTFTGNWSGSGAYIKGHSCRSTKPYYKQLAASYHDSVVSVDEHKSTVTCSSCFGRTSKRLTTRSTTINRDLNGAKNIALIGFSSLAAENGLPLPPFRRTHNPNKFILSSTFLAHQTHGFLLSKLQKHLK

SEQ ID NO: 3584 - protein, 1056 aa, Mucor circinelloides
MTQTRKRKATAEAGPSKPRKPKRTEPAPPPPPPPPPPAGAAVNTELKTQFVVRKCKIGPLLREPYKQYKNFFRTLAEDYSVLRQDAMNFVLLILIQFFNTQQVELVQIYTNNITNVQRSINQLNHYVRLAEQLLTELLSLITNINQNIDTDSENITAALQGLTAPINNLLDQLRPHIQDVDDIVHQMHAAVTQENPDIANVNQLHDRLNHSVTELRPQINAVQALITQKLQYLRQTKTRIENDITDILDRLTQEERTIINIITQSRDTTERIESGRQMLRARLNQFRREDLNQAEILLQSQLNAQLRIFIQNQQDVLTASQRYQDQQRQTIEASADIQQCLQLDTIKRQLQQIEKQNTALFQLAEITSQQLSLAIAEPEGRPLFPKLTDATFWSHVYRKVAIDPNGLNRTIQFNQSIQRNFPDFDISRKIAGSEEYAYTVPTLDRLHIAISSQYGTTIIQNVVMHLLNTRLWIVRIFKGYFVSQQNPPDQEFHRLPIMTLAKKATDGIISHKRFDEIVFREENDDELPIFENLNNLYDQVRLIYEAEFPGLNYDQVDDYSTASSHPLKYLRLSYRLLQLATSMHDTPIKLWSLIPQGSHSIVHVLLSGVTVLYRLFKRAHENHLPVPERLIRNNVFIRLTDFDNAYFRYEEKRDLWNDVFDLARIQDRELRLGFGMKTDGHMISILFEKIAQNFVPQNKKEIMMQKTQKNLTNWTNGLYPLYKNPVGITAEDRIVGIDPGKTNLIAFEIAIIKLNSSYKLRSGMSWLKQKELQSRTQTNIQASYDRLQTRKACSNEGIMQFLNAFSGERTEIHRFMRSWQHREHKGYAYSNRKMAQDYIARVVLGRTKAGEDFKLAHSSSSSSRRKKRKRFRQQHQPELRPLTDIRRTVIAYGDANIRGTYKGNTPIPVKSVQRAIAEKAIVITVDEFRTSVTCCHCHRRLNNATSELHGCNHRKKRHRIAGVEKRSRMKCIDEEGNIIHLSSQCPDRRLTRQNNTIYPLKLCTQCPVNRNNDLYWQRDINAATNIRSILVEYINSNFNIGSRPAALSRGRQDQGS

SEQ ID NO: 3585 - protein, 295 aa, Mucor circinelloides
MRIKTRQIDSFTPGETNISAVASLQKSQGRYKAEKHTESNKKRYMGALKSQFRFRLRSEINLVSKKKRTTAGHQVMEAEELLSGCSIYQSTTAEELDRNYQEHEQRRESVRSFYYSNNQCKRRRHLELSKRRAHDRIAAAERKASGFNEGGKALVMFVGDRGHRVDSHIKGHQRFGGTWKQEIHGRYTPTVIINEHNSSQTCLFCFLKLSHPLKTIGDEVKTSNGSFVCTNDKCPNAFKLVCRDQVSVLAIGLAGLASILFGVTFPCFDQQPCRLKRQQFNDSALSFLEQKQQQA

SEQ ID NO: 3586 - protein, 263 aa, Mucor circinelloides
MQKAIVNVAVGFQEHDPEEKSAIDRPFKSFHITGYYKRYDLPEITQRLIMRRHSTSSVKSNSCWRADLKQVIHYRQASALIQPNTLNIQLPSSSEEPPPKRRRGRFRKQVQQAKITAIPESDTPLPSMFLGIGSAKNLNELRDAFEALGRVARHSTALAYRQPLARWKIASERQSSNRKKPIVFVGDRGHGVGSHIKGHQRFGGAWKQKQHVHYTPTLIINECNSSQTCLFCFYKLSHPMVAAKDKVKTANGSFVWCDISLLR

SEQ ID NO: 3587 - protein, 687 aa, Mucor circinelloides
MSLKVRPSTAAAYRKSSKEWQVSVDLSKYVGTRSIVFMFYCHSNWEDFCGENRHRYSVDFRLPLTVGPTEFVLAYFKESVLKRTYKKSISIETNVRTQIALRNDENEKSELTLLEIAENAPSSKNSNKGVIDILLGVEALNYNHLSVSEEDQRDFRFDQESLKALLIDTTTLFSLFCSKNVADKMHIYDFSGHLINRLPRAMAWNLPVLPGFKAVRLYGEVTFTRRNTNTSESANAEIDWMEDQDNDEMLKELKSRKAAFEQLLKDATKELNKCLVENNSVRSEKRQWKENPDDRDMHYRRVHYLKFMKRGLMLNVRNAKEQLQATKREIYEHRHPASTTSSSPIIVNSEEPCLRKVEECMIDDSQLDLNQAVFSGTDNGLIKTTETVFFGIDRFIFHLELYNRFQILEDPMDXDDAWESGCRQLPPTLTLGPKEINQQSGLATYTASLVKKKKRTTLGHQVLQSEQFLSECSLHQSANTNELDSNYREHEQCREPIRSLYYSNSQCKKRRRLELSKTKHHDRVAASERKXSNHKKPIMFVGDRXHGVGSRIKGHQRFGGAWKQELHGRYTPTLITNEYNSSQTCLFCFHKLSHPMVAIKDKVKATNGSFVCXNAQXPNAYTXVCRXQVSALAIGLAGLASLLFGVTFPCFDEHPNRVKRDEFNQSALSFLHRKQLQGSPIDDGNTF

SEQ ID NO: 3588 - protein, 582 aa, Mucor circinelloides
MNTSASLNIIPHKQRHARDRHKKQQEQPISALFLKDSISRPYIEKKLENVSEQEIDTVIRIVQFAKPYIPAKANYRSFAFQLPFLLMANQVLRSIGRESQVVKIAPIISPTFLKALLIDTTTLFFLFCSKHVVEKMHIYDFNGHHTKSGAALAHKDAVLGSFFDIERLKSVTKSYGLEFANRIYVLPGLKAVRLYGEVSFTRRNTKASESATAEIDSMEDQDDDETLKELKSQKAASEQLLKEATKELKKCLVENNSVRSEKRQWKENPEDRDKHYRRVYYLKFMKRGLMLNVRNAKEQLQATKREIDEHLHPASTTAPSPIMIVNSEPCLHKADVYTACCSFKLCLILEDPMDTYDANEPECRLLPPILTLGPKGINQQSGLATYTASLVKKKKKTVPGHQTLQSKQLLSGCSLRQSANTNELDSNYREHEQCREPIRSLYYSNSQCKKKRRLGLSKIKHQERKSSNHEKPIMFVFDRGHDVGSHIRGHQRFGGAWKQKLHGRYTPTLITNEYNSSQTCLFCFHKLSHPMVASQRQQDQKHKRIICLSECSMPPMHRLSSAEIKSLPWQSVSLGLVAFCLV

SEQ ID NO: 3589 - protein, 222 aa, Mucor circinelloides
MSEATFKSIILEKKRQVFESRKANAFEDAICVDCSKSGHYTKAYFKCKLYIADTANTVGSSSGKNRKQTYEDTSHCLWCRNVRQRCSQSEGAQMWCTVVPRYKRLVGGAKSVSYIESLLNRGTTVVGKLFRTLKRREAEGRLIVTTIHEFKTSKTCNLRLSDGLTIIDTDNFKGIGVVCCHRCKQLWQRDINASNNMMTISKAVWSGQGRPEVFTPERNTSP

SEQ ID NO: 3590 - protein, 305 aa, Mucor circinelloides
MAALPLINDNGHCKSIQAVVVLDGTNNSSLKAEQVTLDGGPVNWDTRYGGTDNGIVTFTETSKFDLPRSQSHLELYNRYQCLESKGDNASEFSASDSKDAGTQNPDSKDAHSKDRGSGNQKRRSKKDSDFGKQIASFEAMKSDYSFLSATAAEEHQRCRLIDRLRVEERQDLGRQPVLFVGDRGYGINFRIKGHYLRCWGGSWKAKVHGRCCPVLVTNEHNTSQICLFCFKKASHPLKLVTKNKQYVRNVNGSSVCTNPTSTLRTKGETHKARDSLPALAVGLAGLSTVIFGQPILSFDPSFSES

SEQ ID NO: 3591 - protein, 416 aa, Mucor circinelloides
MPRIPIYPEVEKFIILKKHTKLKEVESDNKKENSTTQTPKRTSTKRKDSPALITAKRKAKRSRQASTSAASSSKNNCSSCQEEEHSSARSSQCKNYNPKLPERLQIRLGSHQRYTLSVPFETLCNDNPKKANALKKVKDISSFVREVLFKAQLFVNHFILQHPTKLTNDFFEQNFWYTISRVIRGSSDTVKSTLQAYKDTKKGRPAGQNLDVDQLASSFVNLSATTNGSLFVSENGLKNYGQSLLTACETVATTYNNYYIEKFENIICNYFIYTLKTEYPISDKSKMPLVVFGDGLKNKDHIKFRGLRHGVSNKVYKQLQARERINEFKTSKICNNCLKEDLENLKISRDNKETKVHQVLKCKTCNIYWNRDFMASKNMHTIATSIWCGNGRPQVFKRHTATSNVVVVAHSGESAT

SEQ ID NO: 3592 - protein, 271 aa, Mucor circinelloides
MDXXDIVXSTCLNLPETHTVGPKQIAQXTGLTSYTFSLVSKKKRTAAGHQVMEXEELLSGCSIHQSTTAEELDRNYQVHEQCRNSVRSFYCSNNQCKRRRHLELSKRRAHDRIAAAERKASGFKEGGKALMMFVGDRGHGVGSRIKGHQRFGGTWKQEIHGRYTPTVITNEYNSSQTCLFCFRKLSHPLKTIGDEVKTINGSFVCINDKCPNAFKVVCRDQVSALAIGXAGLASILFGVTFPCFDQQPSRLKRQQFNDLALSFLEQKQQQA

SEQ ID NO: 3593 - protein, 1147 aa, Mucor circinelloides
MRTKTRQIDSFTPGVANINAAASLQKPQGRHSAEKRTESNKKRYMGALKRQFRFRLRSEINKCNQDKKKDFGGLLKSLLAAKRLPKGVVTDAEASIKATDQPIQQFLNSNYRKKNLQTVNLWRDYVKKNFDDIKRFVLKGDDGDDDSNEESDNDEEEEEAEEEEEEYQDIQQRACSASLSSIIRKDLPPAVRQAFMDTINITIVQVSNYMAEFSKQVLKIALXFNDHAFSKQNRRIALVPQEGISLXPVLPVGYLDYTVRVPKPVDADCLKDPDFCSKYSQLFQLPHLELIXSTYYGALGVQESSLKATPLHREIVEAVPRDDPSPYEALSFHAMKMARQLYETNLQNMWADNTIVNKLLTRLLRFLLLIHLRPDQDRDPKAKKKELQDKSKGKGKGKQVLQDTNTSIPVESISLINKTRNGRRRSFRNEQQRKKKYEDKGNTRAAERCQMRLDTYREVLARERREREDQRGETYQQQQPVESYDIEEQLVQDEIKAEKSQDISKRRLGXXVXVARSALFHNDVISQAYIEKKLEQAXEKEIXVISRIVVFVKPYIPPKVNXRSFAFQLPFVLMANQVLRSIGRESQVVKITPIVSPTSLKALVIDTATLFSLFCSKDSTSKMYLQDYSGRLIQAKSALYHXDAVLGSFFDMQKLHSLXKDYGMEXNHRMHILPGLKXVRISGIVSIMRTKXKTLEPAKADNQDMPSDENEHDDETLAKLNDRXTALEKLLRDRTKELHQFLVENGSVRSRRKXWKQKPDERQDIGSKRXNLKVETRERMTRVRDARXQLQAARRAIYXHRHXNTVPATNPIIIDSKPSLHKAEECELSDRVSLTNAVFAGTDNGLIKTTETVFFDIERFALHLELYRHFHISEDPMDIDDIVLSTCLNLPETHTVGPKQIVQQTGLTSYTSSLVSKKKRTAAGHQVMEAEELLSGCSIHQSTTAEELDRNYQVYEQCRNSVRSFYYSNNQCKRRRHLELSKRRARDRIAAAERKASGFKEGGKALVMFVGDRGHGVGSHIKGHQRFGGTWKQEIHGRYTPTVITNEYNSSQTCLFCFRKLSHPLKTIGDEVKTXNGSFVCINDKCPNAFKVVCRDQVSALAIGLAGLASILFGVTFPCFDQQPSRLKRQQFNDSALSFLEQKQQQA

SEQ ID NO: 3594 - protein, 608 aa, Mucor circinelloides
MRTKTRQIDSFTPGETNVNAAASLQKPQGRHRAEKHTESDKKRYMGALKRQFRFRLRSEINKCNQDKKKDFDGLLKSLLAAKRLPKGIVTDAEASIKATDQPIQQFLNSNYRQKNLQTVNLWRDYVKKNFDDVKKFVLKGDDGDDDLSEQSDNDEEVEETEEEEEYQDIQQRTCSASLSSIIRKDLPPAVRQAFMDTINITIVQVSNYMAEFSKQVLKIALLFNDHAFSKQNRRIALVPQEGISLGPVLPVGYLDYTVRVPKPVDADCLKDPDFCSNKPSLHKAEECELSDRVSLTNAVFAGTDNGLIKTTETVFFDIERFALHLELYRHFYISEDPMDIEDIVPSTCLNLPETHTVGPKQIAQQTGLTSYTSSLVSKKKRTAAGHQVMEAEELLSGCSIHQSTTAEELDRNYQVHEQCRNPVRSFYYSNNQCKRRRHLELSKRRACDRIAAAERKASGFKEGGKALVMFVGDSGHGVGSRIKGHQRFGGTWKQDIHGRYTPTVITNEYNSSQTCLFCFRKLSHPLKTIGDKVKTINGSFVCINNKCPNAFKVVCRDQVSALAIGLAGLASILFGVTFPCFDQQPSRLKRQQFNDLALSFLEQKQQQA

SEQ ID NO: 3595 - protein, 225 aa, Gongronella sp.
MDAKVRIERTNKAVLYDESFGKAATTKNAPSGSLNVIVGVDPGLKTFATAAALNWKDFVHHVRNIPRFATHFNDAVANDTPAPVKALTIASKHIRHIAGTTSRQNQLEARKPKLVMEMEKKLAVAATPSTTPYDARATQLECRPALIDFYVKSKNATTDARSKLSLKERAYACAANAVNALAKSPSQATVYFGDGSSCQLPNQGPYAVIACSIHHQAQGTNGKNQ

SEQ ID NO: 3596 - protein, 1136 aa, Gongronella sp.
MSSQSVVDQLVPRHIKSSVNTSSPEFEANVAEWKDILKTLDDRLEEATGAGPDKYVKAHRKKGQLSARERINLLLDENSPFLEIGALVGFGQKEYAVGGSVVGGLGLVSGVLTMVYANVPTIGGGAMNYASTLKIHRFMEIAMTNRIPIVTLVHSAGADLKSQFNVFHYGAPMFRNQAIMSKDGVPQCCVVFGNSTAAGAYIPGMSDYVIMVKKQAQIYLGGPQLVQMATGEINDPESLGGADMHSRISGVSDALAFDEYDGIRKAREWVAGLNYEMKGTLPLRHVQGHYEEPYYDPKELLGIVSANIRNPYDAHEVIIRLADGSRFTAFKPLGFCLVALHNNTVSGGNLYGVSRIPNVLFLPFAAALPGRSVGVIAPSNAPERALHSTIKTTQTEYASCGEKGNCVVLHPLRENAFFRRTVRIWLPLAQTGPDCHRCSLRNLRGIACDLAEIKRKSSKIRVLHKEDDVDVGALHPITPADFPPSIAVDLHGIVMAILLELAAIKPAQLRNVTPTILRRRPQDTIAVYVALLRCYDTYKRDNPLSEVFVLTFNLLPMISNRHRFITLNIATISAILQRRYIPHDVPAMPNPDNERQFYPKALCAAPIFAWFLNLTVIGYETAQQLKTGAVYDRLFSGVIKSNGVQAHITFSRHSSRPKPPTLKDIDLQGLAAEGFSPCGVDLGRRTYLTSSHHPSVGDHDDPLAERATRKVSASEYQATSGEVNRALSREARKKRRLPRQQGTIEDLEASIPEHRTGDIASFRAFIRNKITKEDTMNVFYGSPIETQHRFKAYQGRQRAIAHAANTTTTGGRKYRKEARIKKKTRRNRRRRHRKALARQAARGAAFVTLQAQTIEIEAAIEAIDVTIRGQQERHALLGDQAPAIARQQQELADQERSVLNSRLAENQEARRRLETRDQQQPQRALKTQFSGKQPTIEGIPLVGWSNGLLKKESNKIKGHTVGRSSMILQNLHQRQACGQLLVTHVDEYLTSKTCHRCHRRISTLPVVDGNQTRQVFASVFCPGCGHIFGRDENAADNMLTIVCDRVLNNRRPAALTRPARQRQPDPNQAPTNTTNATNTTGLGRQAAAALPAMDNEEAMPDVSTTTTRMRPRSPSPPLRRSTRRRTRPDRYTPGDT

SEQ ID NO: 3597 - protein, 482 aa, Gongronella sp.
MQSRLQHQQQGQGQGHAGRRQLHRQGLGQQQFQQQDTGQFYKLFNWYPLRRSWVPSAVQVDTRILAQCILPNVVYRNNHNGLTLEEYKFQLWSLAANLTNAIWQAEGTPDDHGVPQGWPHANDQWRRFCFRGTIYTDGACLSVLKATRDTNASQPRRPFVPAQRETRYITELTDQEKADILQNMEDHPDTAPVVYVDCGRRDLMYAMAHDSTREHRRTFIYTQAQRRNELGRTRQRDLLFETGSGAMADVTAAQLQEVLAAQQRLSTLIAKTQNLGDFIAYLGQQALEADTLHAWYALRSTRDRGPGERHPLPLYRKLRFDRYIANQQSDSRLARSIRAKFGNQAVLVMGNWGAPMVRNQEPIRGLGLRRMLKKKGFTVFLIDEFRTSKICPNCLSEPENERQGVALFGLLQHDPRQIENPRPWRSNLVTVWGKLICQRCQVPQNRDTLACRNMVTIGNAVLMNEAIPAEFQRPTPQFPPNL

SEQ ID NO: 3598 - protein, 918 aa, Gongronella sp.
MDIPLIGAAPRARKSILQAIFQVLIHLPGHMYEARTANPIGMSFYYSISIAQAFQLIILAQKVRREREHPPCPDCQRPGHRSRRDPACPMHVQALQRAARRRGNQAHRDAVRNTQVFRCLSCGQLGHRNRRSRLCPMHVPTKLEFLNDMLPLREKYTRCSSLEQGVRPAYQEQIRQQAIAASDAVRNTLLRAQLLLSDFVLSHQGADISFFFGENGMYQLTRLIRDKLAGEERDIFPQALIEHWTTSFSTRFPAARTTAIDEIHMTKALAHACEEIGTSNKQHADLLPHRVKSYIKFRILAILKDRGVRTSPMRHVYEAVEHVFNQATNAVPGVPMAPLDDDNDDPDEQDDNAGMNAQRQVLLEAMRVVYEEIQEFKPGALATLDEETVHAHPSASISMQATFLHVYDLYKAQQDDNDDDDDDDGSSIGVPSFSILPIPSRHRRFVTIAPESIGTFSGISIPRRQLGANPPPAFIDAFRHFWQVFNMQKWGYASLDAMQRSVFLGHIFDAVVRTDGVQVHFVFTRLKAASRPPALREEDMGNLDAVGHSCVGIDPGRRTIATMAYEVPIDEAGDATGPSAIRRVSLQEWQVVAGEPSRARAYQGRLRAAGRVDSDVPEHRTAIQEQFGEYVDHRLANETTDSAFFADDHAAARFEAHKGKQRAAQHAANVIMYGGKKHSKRGRRHTKRNRKQRHARALRKRRLRLIEAHDANAATKVHHDQLAAVLEGIETTIIALEAMDANTTLTQIIQQSRDQVQALQELQRQDHAIMAARLAHASHPSSPMRDSKRQRHGTWKNVSSSTQLIMYGTGLMGRRDQARIGGIPAGRSELVRQRLTEHQAQGHCMVVLTDEYLSSQVCNSCTSRLDNFGNVFALKHCVEEAKVINRDDNAATCILQIGQHQMQHGSRPFALRRPPPRP

SEQ ID NO: 3599 - protein, 911 aa, Gongronella sp.
MDEIPLQHHIIRPTELDVPGGGPQTRYTIVKTSISSVGLNIGNIGNNLEDYVIRVNYLIKHQLQALKYIYLALFDIHGNTLLNSQQQAHPDMSRLVNDEYFSRCVFTYLADGTIPGQQYILVPGFQTLMEEYIRHSQFQRAIFFGRVQQTSHYATNQVNAAYLNNVQQNFERRVLYTLDFVFKQRNVREWARRQRRTENPGAEDDEDQENTEFNEGAYATNIRQLKAQIGAVNADGVPQLIENVVDAVPAHLRGPMLQEAQELVNDLRLCFGQIQLQPNEFIRADSYFVDVKYSPKRYVNAFYLLSRYAAAHEAPLVHQQEPGEQVDFQSYRSYNWYPTRKSWVPSAVQIDTMILRECVQRLNFDTLASRRPAGRQNTQDYKFDIWSLVVNFANDVWWSQGQIQGDEQQPPAWPHDGHWRPFCFNGTIYTDGVSVSILKTTRATNAGGPRRTFVPSVRETTYIHELEQVDRQRLLAVHQDAQSSLVYVDCGRRDLMYCMSSTSTPQNQQTYCYTSSSRRKTLHRRHYRMLRQNVPHEVSQSQQRMNTVNSKTQNLAAYVDFLGQQAVEWEILHDWYANATTLGNGETGQPQPLYRKLRFNQYIARQQHDQDLANAIRTTFHDNTVLVMGDWSAPHMRFHEPIRGIGLRRTLKKLGFEVYLIDEYRTSKVCPVCLTNTARMDPQRIENPRPWQNSTVKVWGKLVGHSGVTHLTPHEMPNFDFFELRVINASQTVEWEILHDWYANATTLGNGETGQPQPLYRKLRFNQYIARQQHDQDLANAIRTTFHDNTVLVMGDWSAPHMRFHEPIRGIGLRRTLKKLGFEVYLIDEYRTSKVCPVCLTNTARMDPQRIENPRPWQNSTVKVWGKLVCSNNDCGRTFNRDNMACRNMVIIGDAILNNNPVPDVFTRGGA

SEQ ID NO: 3600 - protein, 205 aa, Gongronella sp.
MMSSKRGAKQFHAFTAIHENCHLQQAVEWEILHDWYANATTLGNGETGQPQPLYRKLRFNQYIARQQHDQDLANAIRTTFHDNTVLVMGDWSAPHMRFHEPIRGIGLRRTLKKLGFEVYLIDEYRTSKVCPVCLTNTARMDPQRIENPRPWQNSTVKVWGKLVCSNNDCGRTFNRDNMACRNMVIIGDAILNNNPVPDVFTRGGA

SEQ ID NO: 3601 - protein, 692 aa, Gongronella sp.
MAEIPPLHYCIIRPAALDEPGNAPTKFTTLKVPFSSVGWNVDHFQRLQDYVLQVNYLIKHQHQALKYIFLSLFDIHGDNLLNFDGVQNLHPDMSNLVNNNAFIQAVFTYLANGTIPGDTPVIVPGLETLLEEYIRLSQFQRTPFIGLVQNPATYASNQVQAEYLNNVQANLNRRVMLTLDKIFKMAEVRDWLRQQEAENIDADANDPDVDDELNDVFNNGEYAANLRLLKRQIGDANVNLADIQQTVDAIVNVVPPQHRGTMLQEGRALVNGLRHHFEQVDGTVHSQNYLVDVKYHPERYVNAFYLLSRHFAEHEAPPGEQEDRINAYPLYNWYPLRKSWLPVWWAQTYNDDNVPTPVQWRFGEGTWGRFCFQGTIYTDGVSISILKTSRHTNASGPRRTFVPSARETAYIDELPPQECQELLDMSDGGQGSIVYVDCGRRDLMFCMASTSTAANPQVYRYTVNDRHKALGRARQRELIEDIPANVAQAQQRLSTVTAKTQRLTAFIDYLGQQGAEWGVLHNHYANHQTRSAGNRGYTVPLYRKLRLNMYIARQQADQDLARDIRAAFHDNTVLIMGNWGAPHTRFHEPIRGVGLRRALKKMGFTVYLIDEFRTSKVCPNCMQRTVRPNPAIVENPRPWQNTTGRVWGKLECSACPSILNRDSMACRNMITIGTAILNGEDIPEIFRRPATA

SEQ ID NO: 3602 - protein, 862 aa, Gongronella sp.
MPFFSIVKEKLDAKARAAQQEEQGEEGEEGEEGETAATAARVEQQDGDRLRAEAKARLELAYTHARPTNQLCPDYIKRKSVTTKERLGKTRRTTIKHGLVSLLSNDITDDDQRILLDGIHNIVTFNRHLAINAILFTQKYVVDILHSGGHVPRALFTQAFFIAVFQLILGNPVSNKALFADNDTHLAFLQAFDQFKTEHPQIHMNKMVGANGKPNGFASVTDYTAIQLATMMKNHVVENFEIFFMRYLAAKFAMDHPDLKPHHCRSYAMYAYDKVCKDELFPPELPDYKKMKAEQKEQLKNDADDLAQHAESKLARVGDFVVEEKAQIAEASRKRQEANDRARDMSLANRNAIIAALTFSSTSRTVVAESSAAGKLARVGDFVVEEKAHIAEASRKRQEANDRARDMSLANRNAIIAALTFSSTSRTVVAESSAAGAAQEAAIAAQGAAIAAQEATIAALEAAIVQGDALQAAALQSARDRAAELHAAAAEAQVAAMAQAQETEFAGNVAATMHIAARNTHATYNACAHAANSHHANVIPSLAAAASAAHAALGQAPAAMAAIAQESFRQADQSYRDALNYSAMLVAAVENAQRNAEASHFVAQQAAQVHATAIALSTAKNAAAEAAAADASAADAQVTSIMAAMAAANDDNNNNDNGDDDEDHPMEIEPLDDDDVSMMHASDAMSTSTVGAAAMAQLHVSHNARLFGKCPLICIGDAQFRRMNWRGKPSGRPALLRRALALAQRACRLLVVQVPEPYTSKTCSSCGRRSLTNVTKRDSGVDNFKLHGALTCTWCARIWQRDVNAARNIRAIALMNINGRNLPALDPDNKDSRPAVFTKAYDEPDPQQPPFHWLPKKQTMIA

SEQ ID NO: 3603 - protein, 944 aa, Gongronella sp.
MPYFSLVKEKLDAKARAAEEQEQGEGGESAATSDRVDQQSETTGGGQGDSETNDKRSKKGKSRMTTKRKQRSDEKEAKMTAKGDFQAATKASSAAVKNPCPRCKSAADRLDGEATAMIERQSDFTSDPAAARARMDEDPEYQRLRGEAKARLELAYTHSRPTNASCPDYMERKSVKTKRRLGKTRRATIKHGLRTLLRGDIPDNDKDTFMDGIKEIVQFNRRLTIHTMLFTRKYVLDLLDTGAHVPRALFSQEFFHAVFQLLLGDTVTNKALFADNETRTSFLDAFARFKSDHPTIAISKLRGVTGKANAFTEVTGYTAKELAVTTATLTRYPHFFMEILFDALKQMEVWNDEDAAKPAEVATEATYAWTKHQLEKKVPAWINLNFRRRSRLTRVIKKIINGNNDTLDITRLPYQNQLVGQSSKDAIHAIVTETKQKIKNSTFKPEIYIARPAIRLFAIVPAPSFRWRYIHVSHRTLLTVLQFVGLTRYKQGNQTAPDDGSMHPVFERLFNWTKIQKPKTAVFDNALATDGMATSVFYRIPVSGKAFPELTLEDIHPEDLKRCHVWGVDPGINEVFVAVDGSGHEDGIYGATRPRLPRLPRSAGIRVRSSSVAPDTRGRERDPKATRTRSASLPPYRSRRTTEMAQSHQVRSFSTREFFHVAGITQTNQKLKARKESAADQEGMTIAQLESQLTSAKTAIPARMTLHVQSVLAALPRLLAFYGQAHQGLRFLNFQGRQRALQEMVAILCHGGQKYKPKDTTGPRPTDQQNGPSEQTPGTGQGDLKWRKEPNRRDFAACPLICIGDAQLKRLNWRGKPSGRVALLRRGLALAQRACRLLVVQVKEPYTSKTCSSCGRRSVTNMTKRDSGKDTFKLHSVLTCEWCARIWQRDVNAARNIRAIALMHINGRHLPALDPDNKDSRPAVFTKAYNEPDPKHPPYWLQKK

SEQ ID NO: 3604 - protein, 451 aa, Gongronella sp.
MAQFTSYIRRKQQRRASILREQEERDAAAQVEEAARAAEEAARVSDQPESSTMAQARQQGEEQTIQRQEGQPAVAKRQKVGKGRSTAKRRQNADEKEAKVEAKEEHADAIKASTTVVLKPCPRCTKDSQEADKFADAILVADPSYVQDPAATHARLSEGHQEYRRLRALALERLEQARTHARPTNKDCPFYIPRQKVQTQTRMGADVKLRTVTIKHGLFSLLRNDIADQDKTAIFHAIGQVVAFNRILEIHAMAFARFYITAILQSDPAVHVPRALFSPDFFHGVFQLLTGGEWTNTKIFGETAWRAAPHVASPDKCPVICLGDGNFDRIRFRGKSHGHVKLLRQKLRQAQKQGRLIVVDVAEGYTSKTCSTCGRRALANVKVFLPFQKVYALHAVVFCNKCNRVWQRDANAARNIRSIAILAVQGSSLPAVKKTNPTSRPLVFTKSYDNS

SEQ ID NO: 3605 - protein, 368 aa, Gongronella sp.
MPFFSIVKEKLDAKARAAQQEEQGEEGEEGETAATAARVEQQDGEAPTGGQQSDGQGQVAADDAAGATTEQIQAASEAGTSSDASAKRQKKGKGRMTAKRRQNKDEKEKKITAKEEFAAATKASSAAVQNPCPRCKSAAARLDDEATALIEGHADPVAAQDDPEVERLRGLDHQALRFLNYRGKQKAASEMINILVKGSRKYPRPDDDTIAMRTSVEKPAKWRAAPHVASPDKCPVICLGDGNFDRIRFRGKSHGHVKLLRQKLRQAQKQGRLIVVDVAEGYTSKTCSTCGRRALANVKVFLPFQKVYALHAVVFCNKCNRVWQRDANAARNIRSIAILAVQGSSLPAVKKTNPTSRPLVFTKSYDDS

SEQ ID NO: 3606 - protein, 905 aa, Gongronella sp.
MNKLVGVNGKPNGFSKVTDYTAIQLATMMKNHVVENFEIFFMRYLAAKFAMDHPELKPHHCRSYAMYAYDKVCKDELFPPELPDYKKMKAEQKEQLKNDADDLAQHAESKLARVGDFVVEEKAHIAEASRKRQEANDRARDMSLANRNAIIAALTFSSTSRTVVAESSAAGAAQEAALQAAQEADIAAQEATIAAQEAAIVQGDALQAAALQSARDRAAELHAAAAEAQVAAMAQAQETEFAGNVAATMHVGARNTHATYNACAQAANVHHSAVIPPLAAAASAAHAALGQAPAAMAAIAQESFRQADQSYRDALNYSAMLVAAVENAQRNAEASHLLAQQAAQVHATAIAMSTAKNAAAEAAAADASAADAQVASIMAAMAAANDDNNNNDNGDDDEDHPMEIEPLDDDDVSMMHASDAMSTSTVGAAAMAQLHVSHNASVTTATLTKYPHFFIKVLYDALKEMEAWNDDNAARPAQVAAEATFPWTKHQLEEKVPAWEHLNYRRRSLFSLRHLLGALHEIVDVPVGLLAQVRDGHRNLALDLADVDLVCAGVAAQHAEKTPAPRTQHCRRGPPLFAIESGLPQCGRSSMMRRRIRQDRLRRFSAHEFDHVAGIKRSNAKIKTWKANDIDQEGSTIANLESQLASAKTSMPSRMAQHVESVLAAMPRLLGFYALAHQGLRFLNCQGRQYQGRQRATEEMVRILCHGGGKYQPKDTTGLPPRDQDGASTQTASMVDRDLKWRKAPNRRLFGKCPLICIGDAQFRRMNWRGKPSGRPALLRRALALAQRACRLLVVQVPEPYTSKTCSSCGRRSLTNVTKRDSGVDNFKLHGALTCTWCARIWQRDVNAARNIRAIALMNINGRSLPALDPDNKDSRPAVFTKAYDESDPQNPPFHWLPKKQTMIA

SEQ ID NO: 3607 - protein, 879 aa, Gongronella sp.
MRTDFYRLKDTISQTNIAPDGMQPNHPEYRLLMTNNDFEENQQDQPRRMIVKTSFSSVFNLTTPQVRQAFQTYVIDVNNITKHAYQFLKWCLLRQKALYPDFDPTPYVDARNTAFYKHVWGAMISNGAAHNNNDFNGLFANQHEVNGILHPSHLQSYLDLTGYVPPQFNNFGQTQTYEATKMQQSYVNNVRQRYGQHFCRVINILLNLKENIADARQQGRSNHWSQARISAHVQQQWVLPAREFKTRIAEFPHNQDWVDGLDGIYLAAFQELQPVFEGYQGRNFNMPHPDDLTRRINSIFYHVKANRVETMVHFRSFVALHDILAARPNTRNFVAFPLRKANSPRYCQIDSRILAVNILKVPGATNATYNHDTKMNLWRHGSFFDNGGPIANILLRPFRPKPVEADDENQIPVEVVRRTKRGRMAFRGSIQTDGVGVSVLKSNFDSTARGYRDRSTASLPGPPTLQLLMTWTNEHYNQHPLIEHIATSGVFIDPGRRDLITAMGVHSYIGPDVSAADGAAAADGAAAGEGAAAGEGASAGEGAAVGEGAAVDEGAAAGDGTAAGDGAAGAPEFINRPMIYRWTAAQRRNETRAKRYQDLIRTLKPANVSAAENLLSHWPSDVQDIDRYADYLRIRTAVQPTLNAYYQDARARSAADAVVRPRSNHRLQLDPQATGHHLIRKLRFSRYIRKQQSYDRLAKNLVAAFGRHAVVSALGLEGPGFDFTDIPEKPVLVFGDWSASNVRFHQPVPSLTLQRAMQARGFDVVLIDEFRTSKLCPTCLDNAHPQEVFKKVRNPRIFRRQNQPTVRRWGLLRCTSRSDECLAGLNPPHHRRAMRQYRYWNRDISACINMRTKFFGMLGDDDHLVPVPFRRPGQPGAQQ

SEQ ID NO: 3608 - protein, 663 aa, Gongronella sp.
MASIGVYKLLDTRHMEAQIQATPFAQLIKRLKTQIGYRRPQFGLDQTIQDIIQGLPQACTEPFRVELYTNGLTFVNQLRDNLETRNPVGGNYFADVKRHPEHYINTFYWLSRFFADNEAPHAQNDQHQQQGQGQGHAGRRQLHRQGLGQQQFQQQDTGQFYKLFNWYPLRRSWVPSAVQVDTMILAKCILPNVVYRNNHNGLTLEEYKFQLWSLAANLTNAIWQAEGTPDDHGVPQAWPHANDQWRRFCFRGTIYTDGVSLSVLKATRDTNASQPRRPFVPAQRETRYITELTDQEKAAILQNMADHPDTAPVVYVDCGRRDLMYAMAHDSTRDNRRTFIYTQAQRRNELGRTRQRDLLFETDSGPMAGVTAAQLQEVLAAQQRLSTLTAKTQNLGDYIAYLGQQSLEADTLHAWYALRSTRDRGPGERRPLPLYRKLRFDRYIAHQQSDSRLARSIRAKFGNEAFIQAVVQYLASQSAHSPAPRIVPSLEGLLDEYKIRSGFASARFPGTSVTQRRYIESFGLTAVLVMGNWGAPMVRNQEPIRGLGLRRMLKKKGFTVFLIDEFRTSKICPNCLSEPENERQGVALFGLLQHDPQQIENPRPWRSNLVTVWGKLICQRCQVPQNRDTLACRNMVTIGNAVLMNEAIPAEFQRPTPQFPPNL

SEQ ID NO: 3609 - protein, 1040 aa, Gongronella sp.
MNLREDQFQQHGSAEAMAAEHGITETEAKTLRLQLLKARGELGRPCTSCGSRLHRNNSDARCPNHADRVLRRQRRMGDVGLRMDARNPDAATICASCGQHGHATAHSPLCPNHECTNREFKRAHMPTSSSFTRVYSFHRLIQPPLRNILKARLRQADLYVRKVLNRLQLFLVDYLLHFPNDAPAVIFTHNGLYQVSKIVRCRMGTGPVGTRNNPLRAIPQSMLDHWPTFARDMGWPTTRYDDQKLTSVLTEECKVQANANRLHVSDLMEKRIKAYAEFRVRATRDEVPPKRVMNLIKSVVWAQFCSANVLMTEGLAALENVEEDDERDDAEDQHDDNDDDDDNDENDDAGADHEEDDVDVEALHPITPADFPPSIAVDLHDVVMAILRELAAIKPAQLRNVTPTILRRRPQDTIAVYVALLRCYDTHKRDNPLSEVFVPTFNLLPMISNRHRFITLNIATIPAILQRRYIPHDVPAMPNPDDERQFYPKALCAAPIFAWFLNLTVIGYETAQQLKTGAVYDRLFSGVIKSNGVQAHITFSRHSSRPKPPTLKDIDLQGLAAEGFSPCGVDPGRRTYLTSSHHPSVGDHDDPLAARATRKVSAPEYQATSGEVNRALSREARKKQRLPRQQGTMEDLEAHIPEHRTGDIASFRAFIRNKITNEDTMNVFYGSPIETQHRFKAYQGRQRAIAHAANTTTTGGRKYRKEARIKKKTRRNRRRRHRKALARQAARGAAFVTLQAQTIEIEAAIEAVGAILRDQQTRHALLGDQAPAIARQQQELADQERSVLNSRLAENQEARRRLETRDQQQPQRALKAQFSGKQPTIEGIPLVGWGNGLLKRESNKIKGHKVGRSSMILQNLHQRQACGQLLVTHVDEYLTSKTCHRCHRRISTLPVVDGNQTRQVFASVFCPGCGHIFGRDENAADNMLTIVCDRVLNNRRPAALTRPARQRQPGPNQAPTNTTNPTNPTNATNTTNTTNATNTTGLGRQAAAALPAMGNEEAMPDVSTTTTRTRPRSPSPPLRRSTRRRTRPDRYTPGDT

SEQ ID NO: 3610 - protein, 1365 aa, Gongronella sp.
MGFKIFIRAKEDAKIRRQEAAAAAEAAAAAEQERLKEAQQQEKDADDAPEREKDGQPPKKRQKKGKGRSTSKRRQKKDEKDAKVTAKDEFKESTVAASTIVKNPCSKCREESGKLDAEATAMLQGHESYANDPEAALAALEANEEYVRKRAAAKKRLEIAYTHARRTSRLCPDYMARQSVLTRTQAPLKMRPFTVKHGLDTLFAGHISNNDKAEITAAVRNVVQFNRQLAIHAMLFTRIYATELLAAGSHVPRGIFTQAFYLSVFQLLLGDKVTNKSLFNDSERAHFLQAYDNFKEQHPTAPVSKLRSPASEKALGFVDVTSYTAIELATVVKNHVVEGFEGYFISYLQASLMRRVETLKPYQARGYAIYIYDMAAKDPNFPAEKPSYKKMDATVLAQMESATSDLIQETRRKWQAVYGYVLEEKAKIAEASRVRKAANEEALARRLANRNAELALMTFSTTRQDGADQDEEMATSDVDVAGQDPPSDDTTAVDDGPAGPMDDNSAAPPPGGPVNGPANAVVDALAQQEHAARLIAAQQAADLATASAAHAVETTNFAGAINLAAQITTRMENEAREAFGTLKNVAYTGQQILASQGAFLSSIAQMATEQDIAHAAEAQSEASRAATYAAEKAMAAEKLFKEALAALEYAASAQRDAIRFSESIAAQASTAQVAAQAAAQASTQASVQTSIQAPIQSPVQALVQAPIAAQADAAPANASDTEMTEAVQEASEDAMSTSTIGSLGLSDLQLGDIKVNTATLTKYPHFFMRVLYDVLVEMENWNEDAEQQPAQVLEEVPFAWMRAQLADDRVVEWPKLNYKKRTHLTRVLCTVVNKKKAIVRQRLPAKLGDKSFAAIEALIDDTKKQLKEKTFAPEIRVAKPPARLFAVIPVPSYRLRYIHITYRMLLTLLKFYGLKRLAIGPNKLPTDGTPHPIWNHLFDMGRIRRPAGAVFQNALDTDSVGTSFFFLRPVHENTRPLLTLDDFEPADLRSCRLWGVDPGVTDVFVASDGCSALSGIYNNQLRPNLPPLPPSNNCRIRSTSVRIPRPSIQSAGRNPTVKSGRRRSASSPRSTRWPQTRTSSAESHEIRQFSAAEYDTIAGLIKTKQKIKQYKADSADANGITITNVESTLATAKTARVARANQHVQAVLAALPRLLEFYGHRHQELRFMNYVGRQRATSEMVAIFCNGGKKYTRPNERKRPAMRQDRWRRTPFHNDEERCPIVCLGDGKFTRRGWRGKAIGHADRLRRALKLAQRDYRLVVVAVKESYTSKTCSTCGHRTLKNKEIKEHGSSYKLHGVLECDLCGRFWQRDTNASRNILAIAHLQVLNQGPMKVPPMDAKDNPESRPLVFTKEYEEIDALSPSSPH

SEQ ID NO: 3611 - protein, 683 aa, Gongronella sp.
MPFFSIVKEKLDAKARAAQQEEQGEEGEEGETAATVARVEQQAGEAPIGGQQSDGQGEVAADDAAGATTALSAIVGSLAQAGLVSRMLDAASRAHRLGRCRPSCLAFAQQEEQGEEGEEGETAATAARVEQQDGEAPTGGQQSDGQGQVAADDAAGATTEQIQAASEAGTSSDASAKRQKKGKGRMTAKRRQNKDEKEKKISAKEEFAAATKASSAAVQNPCPRCKSAAARLDDEATALIEGHADPVAAQDDPEVERLRAEAKARLELAYTHARPTNQLCPDYIKRKSGTKSAPDDGSVHPVFDQLFNWTKIRNNEGGRLTLAEVFVAVDGSNQDDNIYGPTHPTLPPRPPSVRHRVRSASVRPLKHDAASNQARSPSIPRHQSHRHVEKGQRHQVRRFSAHEFDHVAGIKRSNAKIKTWKANDIDQEGSTIAHLESQLASAKTSMPSRMAQHVESVLAAMPRLLGFYVLAHQGLRFLNYQCRQRATEEMVRILCHGGSKYQPKDTTGPPPGDQDGARWRKAPNRRLFGKCPLICIGDAQFRRMNWRGKPSGRPALLRRALALAQRACRLLVVQVPEPYTSKTCSSCGRRSLTNVTKRDSGVDNFKLHGALTCTWCARIWQRDVNAARNIRAIALMNINGRNLPALDPDNKDSRPAVFTKAYDEPDPQQPPFHWLPKKQTMIV

SEQ ID NO: 3612 - protein, 805 aa, Gongronella sp.
MSVQELSHRKSHLQCVHELLLELAEPRFVADTANIAIFGINYALTEDVARLVAPNAKISTAIQEYVFERFCAHPVLEIEVEQNPPAQGAANRTRGRRRGAGGARRGGAGAANQADGAAEDQGAGVPTELPEGAQQGVGNDQVGDDQEATNGPAMRAIAVTDMPESIPAEWRDRVLQVLQKVADIKPITMRQLTPVTIARHPEELIEPLVNIMRSYDDCKKQATLQGNKLRDVPTFNLLPELSFHKRFVTISAETAHQLLPWELIMREAAESDAEAMSLDSRATDPISLDTAADDDGNDDDDDGNGNDDGDEGNGNEDDDEGANPLDNAPFARTLQWFWDVFRMDRFGWATLQDMQSSVLYGKAFAGTMMTNGTELHVHFVRFAPSSRRPQLKDKDLAGVGLSNAIVGIDPGRKVVMTGAHAPVAELLGLPCAIRRTSMEEYQAMSGETKRRIALESRKTEPLHDPPGPGTTISEIETLLPSGRTANAAEYRCRVAYLLQHEQQLRQFYGDDHSEARFAAYRGRQRAIAKSVNRMISGSDKYGQQADRQQTPEEIRRRQQQIDNALEAAQRSLAELDQAVKRERREWQKNVSLADAGFWAALTAQHGAQRQNLTAIVTHLQQQQAAHVAGREMWLARPPPLNERRPVKAHWSGMQTTPAGMPLVAFGNGMLRKDTNAISGRPSGRTENIRKNMLDRHARALVAVTLTDEFRTSKRCWQCHEPVATLRLRDANGNVQQIFATLLCTNCHALMDRDHNAAMNMLQIQESWCTNGSRPQYIARPADRAEDDQDDDEDEEEDDEQDDDFH

SEQ ID NO: 3613 - protein, 743 aa, Gongronella sp.
MDEIPLQHHIIRPTELDVPGGGPQTRYTTVKTSISSVGLNIGNIGNNLEDYVIRVNYLIKHQLQALKYIYLALFDIYGNALINGQQQAHPDMSRLVNDESFSRCVFTYLADGTIPGQQYILVPGFQTLMEEYIRHSQFQRAIFFGGVQQPSHYATNQVNAAYLNNVQQNFERRVLYTLDFVFKRRNVRDFARRQRRAENPGVEDDEDEENTEFNAGAYATTVRQLKAQIGAVNADGVPQLIENVVDAVPAHLRGPMLQEAQELVNDLRLCFGQIQLQPNEFIRADSYFVDVKYSPRRYVNAFYLLSRYAAAHEASLVHQQEPGEQVDFQSYRSYNWYPTRKSWVPSAVQIDTMILRECVQRLNFDTLASRRPAGRQNTQDYKFDIWSLVVNFANDVWWSQGQIQGEEQQPPAWPHDGHWRPFCFNGTIYTDGVSVSIVKTTRATNAGGPRRTFVPSVRETTYIHELEQVDRQRLLAVHQDAQSSLVYVDCGRRDLMYCMSSTSTPQNQQTHRYTSSSRRKALHRRHYRTLREDVPHGVSQSLQRMSTVHSKTQNLAAYVDFLGQQAVEWEILHDWYANATTLGNGETGQPQPLYRKLRFNQYIARQQHDQDLANAIRTAFHDNTVLVMGNWSAPHMRFHEPIRGVGLRRALKKLGFEMYLIDEYRTSKVCPVCLTNTARMGPQRIENPRPWQNSTVKVWGKLICSNCHRTFNRDNMACRNMVIIGDAILNDNPVPDVFTRGGA

SEQ ID NO: 3614 - protein, 779 aa, Gongronella sp.
MDHAIYCHFRGFPCGLSCDLVVETEGVWRRVAGYIAEERRTIALAKQARQQASAQLQVARQERRTRQFGESSSSGVQQTEDTEDTEDMDDMDVDEEEVDMNNDDMEVDNQDDDDNQSIATSATMATVLTATTLGSLGASSMAVSDIPANISVTTTQITKHPHFFLRIMYEILAAMESWNDADTLLPNTPQDQASFPFVRHELETLLVHDWKKLNHRKRTQITRTSMTLINNDIEPHPTRFCKSISHAGKADVAYFIQEVQLQMRQNQFMPPGILVRASLRLFALVPVPSMRLRYIQVTHRVLKTILVNFDLKQHNSGTLKVPADGTPHSVFQLFDMTKLKRAEGSAFENSFHTDGYATSFSFKRPKGEPRPQLTLDKVTPQHLQQCRAWGVDPGVDEIFVAVDSSSYASAIYAASAPTMPPLGDRGINELTLHDTKDDEVIVAAPIGAFARRRARSTSVPPVAVQDRPLRGNRSLSVDARPCDARKPTSPRSRRDYTSHPRHEIRRFSAREYNDMAGIPFVRKWLEEKRTASHITPIESTLPTAKTARLDRVHERVRALLDALPTLLHFYDISHQAKRFSIFRGKQRADAEMVNIFLSGGKKYNNQQATLSRPPTATKNRWRKAPFTANAPGVPPLLFLGDGSFGRMTWRGKPHGHAKRLRRLLAIAQQQGRLLVVSIPEPFTSRVCSRCGARNMANINVLAADAKHKLHGVLHCQHCSTLWQRDVNAARNLHAIATLVILGHHLAPVFKKKNPASRPLVFTKPNGPPPYEPSFYRAQP

SEQ ID NO: 3615 - protein, 698 aa, Gongronella sp.
MNQTRVQRLGNALDRRNAVFATMNHGGIGARLVRRVVKDSAHNVFSTSLGEHHDHAQTTMLERVKELVSKQNQVRTHASAFFKFICLHELERNPAFDIGTLMNEGFLQAILQAMAMHAPGPNAPHATIINRYYDMYLNPGNGAPARLDPPALNLHYYVNIRNYEATQMMVALSNNVKMNFGNKLRQVVNKVLDVKNRRRAIMQDMRAQNTAALQRNEAPLFTDQQIADAIFHQVTEPARVFKDMIAVSPINRDDAWFEDHESPVVRDAFNVLRPVFDVYPQDWACFQTEVAGDDLEEGAPEPAPQIVDSIYARVRVRNEAHLHFKAYYILGQQAAAVGLRLPNIFPMRRNWSPSYMLIDTTAAHHNLRLLHTGAAGVGPITPLRSKFNIWDPVVNFTAKSFQAQGPQRRIKFRGTLYTDGVGVSIVKQDRHTRAQGFQDLQAQRPEDVRNIATLDEEEHDALVGRLVFIDPGRRDVLFTMHEDSTPEDPLTYRYTANQLRKETKRRKYASLVARSKPQIVQQTETFLSQNSAKFNSVSSFNDHLNARAIASGPMRSFYEDLATTGGPNHHGHNPPFIRKLKFNRYMRRQQADARLVRTLLEQYTRVGENGQPILPAFVIGDWSAGNARFHEPTPTKRLTRMLVKHGLEVFKIWEYNTSKICPICQDHINLLETFRSVENPRPHRRASNPTVTCWGLLR

SEQ ID NO: 3616 - protein, 1355 aa, Gongronella sp.
MSAPSSHTDANKADTPASKDDHKSAADQQKKKKKRERRRKKAKSSTKEAIKTKVIVRRLPPNLPEDVFMNAVSRWTGDDIVDYKVYIPGKVSQSKGKENTFSRAYFHMKTMDAVIAFHQGFDGHIFMDSKGNENRAVVEFAPYQGVPKEPKAPDARQGTIEEDPDYIKFLEMLKEEQEKPADTDAQGEGTTPLERLENRLASLTAQSHAQEQASKPKTTPLLDHLRALKAAKAETKAKKKAASKSKKAKQQETIASKSPAANANANAAPAEKAKRRRPKKKATKDASNQGSATPSPAPGASNASSPAPAQQKPPRQPRQPRQKPSSASNDANATPNANANASGSNAKPKRTRNRKPKAGGGGGGDKQAAPPNKEFFSKFMPGSEKYTRVVDLRETLRPDLPQQAVAHLQTSIHRDSRFVSDVLARCQFVLTDFLLMNPTANCKNLFSQNGYYTLTRIVRGTMPRPQNQQRRRGAPPRRRQNPNVPVEALQRHFDALAVISPPMAHFHPGFASQLSIACKTQAANNKEHVSTLFDKRVKDFTKFHLAQLLHADEKPPKAKVSTAIQDYVYERFCMHPVLEIEVVQNPPAQGAANRTRGRRRGAGGARRGGAGAANQAAGAAEDQGVDVPTEPPEGAQQGVGNDQVGDDQEATNGPAMRAITVADLPETIPAEWRDRVLQVLQKVADIKPITMRQLTPVTIARQPENLIEPLVNIMRSYDDCKKQSTLQGNQLRDVPTFNLLPQPSFHKRFVTISAETAQQLLPSHRIMHEPAQSNNDAMSIDSRLTDAMSVDPVAEANDDDDDDDNDNDDDDDDDQANDERANPLENAPFARTLQWFWDVFRMDRFGWASFEEMQSSVLYGKAFAGTMMTNGTELHVHFVRFAPSSRRPQLKDKDLAGVGLSNAIVGIDPGRKVVMTGAHAPVAELLGLPCAIRRTSMEEYQAMSGETKRRIALESRKTEPLHDPPGPGTTISEIETLLPLGRTANAAEYRCRVAYLLQHEQQLRQFYGDDHSEARFAAYRGRQRAITKSINRMITGSDKYGQQPDRQQTPVEIRRRQVRRWTNRRLRRMAAPRRRLARFIKKQQQIDNALEAAQRSLAELDQAVKRERPWCTTPESDAQRSLAELDQAVKRERREWQKNVSLADAGFWAALAAQHDAQRQNLTAIVTHLQQQQAEHVAGREMWLARPPPLNERRPVKAHWSGTQTTPAGMPLVAFGNGMLRKDTNAISGLPSGRTENIRKNMLDRHARALVAVTLTDEFRTSKRCWQCHEPVATLRVRDANGNVQQIFATLLCTNCQALMDRDHNAAMNMLQIQESWCTNGSRPQYLARPADRAEDDQDDDEDEEEDDEQDDDFH

SEQ ID NO: 3617 - protein, 1156 aa, Gongronella sp.
MSVQELSHRKSHLQCVHELLLELAESRFEADTANIAIFGINYALTEDVARLVAPNAKISTAIQEYVFERFCAHPVLEIEVVQNPPAQGAANRTRGRRRGAGGARRGGAGAANQADGAAEDQGVDVPTEPPEGAQQGVGNDQVGDDQEATNGPAMRAITVADLPETIPAEWRDRVLQVLQKVADIKPITMRQLTPVTIARQPENLIEPLVNIMRSYDDCKKQATLQGNKLRDVPTFNLLPELSFHKRFVTISAETAHQLLPWELIMREAAESDAEAMSLDSRATDPISLDTAADDDGNDDDDDGNGNDDGDEGNGNEDDDEGANPLDNAPFARTLQWFWDVFRMDRFGWATLQDMQSSVLYGKAFAGTMMTNGTELHVHFVRFAPSSRRPQLKDKDLAGVGLSNAIVGIDPGRKVVMTGAHAPVAELLGLPCAIRRTSMEEYQAMSGETKRRIALESRKTEPLHDPPGPGTTISEIETLLPSGRTANAAEYRCRVAYLLQHEQQLRQFYGDDHSEARFAAYRGRQRAIAKSVNRMISGSDKYGQQADRQQTPEEIRRRQISAILAPLAAAATTGRPETQIVPTIHNTKNQRQQGHELFLQDVRNPLVPERCASCRRPGHATASSLQCPNHPTNNKEFFSKFMPGSEKYTRVVDLRETCDPTSLSQAVAHLQTSIHRDSRFVSDVLARCQFVLTDFLLMNPTANCKNLFSQNGYYTLTRIVRGTMPRPQNQQRRRGAPPRRRQNPNVPVEALQRHFDALAVISPPMAHFHPGFASQLSIACKTQAANNKEHVSTLFDKRVKDFTKFHLAQLLHADEKPPKAKVSTAIQDYVYERFCMHPVLEIEVVQNPPAQGAANRTRGRRRGAGGARRGGAGAANQAAGAAEDQGVDVPTEPPEGAQQGVGNDQVGDDQEATNGPAMRAITVADLPETIPAEWRDRVLQVLQKVADIKPITMRQLTPVTIARQPENLIEPLVNIMRSYDDCKKQSTLQGNQLRDVPTFNLLPQPSFHKRFVTISAETAQQLLPSHRIMHEPAQSNNDAMSIDSRLTDAMSVDPVAEANDDDDDDDNDNDDDDDDDQANDERANPLENAPFARTLQWFWDVFRMDRFGWASFEEMQSSVLYGKAFAGTMMTNGTELHVHFVRFAPSSRRPQLKDTLF

SEQ ID NO: 3618 - protein, 884 aa, Gongronella sp.
MEQTQEERRIAQLERLRAMKRLKLQQQQAQEHQAAIQVGPCARCNRMGHRDARSRRCPHNPHYGQPTAAEQAALRRAGITELEDATANPNAPPCPHCIDGTCGCLPHSRSSSRLCHAHRLNTKEVCDSLLGPAHVERVVKATLHGTLHLNGPNRRQRHLAKGRVIAQIRHVVDTMQAVALRATQFVHFLILRQLDEDAALPIHERQGLPSYMLTQRYMYGPLQLVTGNTVTSTNPLVPPGQDAAFQEFQEAMGDTMINAVGMSPALAYLALDLATAFRNSIAMTFKTRALQYLAFRVRQALPRDQWPRVKTLSKMCDWAYQALTNTMASDAVPMTMPQAVIDVFAQVQQEGGLGPSSAARPIDQTRLNAEGTVYLAHMHAWLRQMEQNNAEADVINGEAQMVTEVDGGWVAEHLRDIDDVAALSRRRLSRLRFHVKNMINNPNLAVTFGNGIPQPLQVQLAALVHQARGQIERSALYMAGRILIDPASCMWSTTVRRVATVKLFSLFQTTKWTKRFIAVPANLLGVILAGVNVVHTPHSRHQDEPSHVQMQADADVFQSVFNFRKVKLFQAANVYHHFHHLNPGPVPGLKKVFLNIIHTDGHQVAFHYAQRASEDKGLPALTIEDFQDEQGIDIIGADPGHTHLFTAIDGYYPTQTRTRLSNREWISKSGFFIRRRQQLAARAADGIDPLLNSLPAQRTTSPVAWLDYCHAAQQVQPQLVAHFGYNYANWRFLAYHGSQKMQAEAVNIFLGCSRKYPHHDRRQQLPVIAYGAGTFGSMPGKNPKRSVLPALKRAEAEGHLCVVMIDEAYTSQVCLLCQERSLQAKHALSSVSGTMEALWGAKECTICHTNWNRDHAASRNILELAQTLRQGNPRPALFTYTPSA

SEQ ID NO: 3619 - protein, 2102 aa, Gongronella sp.
MFTPPFNRTNFDGLTPTQQSQYLRYKKKHEQELAEQEAADDEDDEDNDDDDDPGEGSSTGHLVNTQRRVLGRQSVATKRAKKQGRKDARRAMQQKQPKKYNRGATKAQRLADLIGTKFHTVTRVGKLSSVLNLEGAVKDGVMSAIRETGCFATAMRVVKLAFVNFYVVAQFEAMQPLPPCLYTKEFQHGIQQLILRKQMTDETILGMHRPRIAALFEDFMAQYPTLMISSPHGHLEHAAVLNYQNTDLSTCLSNFVTECFFQRLASFMCHQLQNDIPTIKKGKAFNIVKALLFERFDIDEESNIPTIDDDLPVGQVNAAVDALRTALSADTASMQAVIALVNSPFRHDGIPVRAEAMQIWARCRHWGDSTTRDDLLAIARGASVAIPAYSKISLATISRFREVFHQYLLLLDHVAERSNAALHPYSTETTRSWAHRAIKKIGVVLNRSQQRRLAKAMVQAANDRDALDHPPFDTSKWHHLGVGTLNAIQASVKKARKELYWSRRCQEWASHDPHMIARCHFPPAPATKRCKVYGASPTSSMRRTHITLDAHSMPTIMSAAGEKIARTEAAYENVIRQDVLVRPGALAGQSPHLASRHICTTDGYKICMQYAKASRPQETLPHLEIADLEPWHLPYFHVWGLDPGERDLVSAADGCTMDVSPMKHPHQFRKMSCASYMAPAWQWGRELDSIRKKHGIKKIESSIPTARTVSIAALSRYLAYLAQHLNALLQFYTLRVNRGRFNVSRMRYKADASIVNQFINSPTTAPGHIDPIPRGQKWRAAPTASDARLPCIFFGDAKLGESVFRGSSTQAGLPKRVKKLFKEAANQHRLLFVEIDEYLTSQICSCCKQRTLEHVPVDLSAPHRASASSGSAPTQQPMPREAPWLHQHYDDQMNVLMDYQGGEFDKLLDRQNLEYRSLLQRQHTEHLQLQQGQLQQVQDGTDMDHLLLESAAQVHQHKLLRKSMSFGQFQERQCTLHDFEQEMSDLLHHQRMQNLIDAFQVRQKKKRKSTRLMLIFMPTAPTAAATTIPRAAATATRAVPTATRSITAAAGAGPFIWPRNDQTFIFCPPVQNLLDILEPRSQRQPQHPTKRHLHGAAWVISSRICAPIHSRATASTTSSRATSRAASRAATTNTTKTSTSGPIYVCIFQSSIQLTGRGTDKTKSRTRVDGICRPFRVSSANDSSCSTLYAIAFEPEYMAKLHPEPAARRSGALLSWLRLAVYCFTAIFFSYQLHYCVPAPKTHRGVSPGSHQAEFSEYNAMSTISYLSDTIGYRIVGTVEEHQTAVYLKNIIRDYQKNAAVVPGAPKFEMWAQHETGTHRFDIMDHMVLKAYTNITNIIVRLSCPENDFTLGTERQCEQDAVLVNSHFDTTLGSPGATDDGSGTAVMLEIIRVMSQRDWSGYRNSVVFLFNGAEESLQDASHAFITMHDLKDTIKSVVNIDACGTTGREILFQANSREMIEAYKHAPYPHGTVMANDVFRTGLILSDTDFRQFVQYGNLTGIDMAIYKNSYLYHTHLDVSQHLEPGAIQHLGENTLAILDHLAKNTSLANIEPTSEMVFFDVHGVLFLVYTWATAFRIQMVTVVLVYVYLGFVIHRTSKQSPYRSVGVLLASYARSIVSVWASGTTALVLPISVALFLMSDVINRHMAWFRHEWYGMLIFVPMGLIGSYGVQALFYKLPGPLHVDMEYGVFNSMVAAFAGMTFITTLTGMASSYVLWVYCSVLFVAALINEFALKPSASRAKQGTPKIHTFTYLIATFPLAFIYSDNVFALIDIFVPLTGRMGIDTPVDVIISIIFGSIAYMFCLPALAHIHRYGQRVLSKILVILVLFQVSILALVVVCGGSPGGWAFPYDEMHPKRLFIQHLKNLTSGESYVSVAEADHGPYINSVLDAMEQELAVSREERTGIYGLQDWDSIYPFSHFLGGYRFNTAPYIRTHTTDVKMARGEKPLLDAHDGVFPVLTVHNDRYDAETGVRSLSIYSMSPSYTWTVISFDAHVVNWSIRDEQPLARPARYVVRHVNGYAGDNGWKLDVSVIVPEEERALAEKGEWKLRVEFTALEGENFAGREQERLVGGVGMLGIIKRILPEWTTTTWLSTVVQDWHL

SEQ ID NO: 3620 - protein, 864 aa, Gongronella sp.
MKARDIIRQKREDKLEQQVQAIAAAVQQAIAALEDRNTQEENSTVQQVVAGEEDESDTPVAESSSMAQKRSLMKKQSAATKREKQDGRRDAQQQRILGPQAKRVQKTSKKTRLLDILGANVNCARVGRLNRVLRVNLPDDQASRLVAVIRDVCLYATRMRFLQMAFTKYFILVCHDAHLPLRPYIFDPHFYHAVQQLFLGKAITNAAVIAHHSTTILRVFVQFRQQYPALQISRLGGIHGTREYATTLNHLNKQTATGHINFVVETFHTRLMHCLAAQLHGHLSNLKHGHALAYARHLIVEQCKLAEEHPAPNVDYINEERVQHAVEQVRQGLRIDLETICTVYALEKTEGEHEAWDAWANARNLGEDATLAILQGIAQEARETIPPVGRVDMAFITRKPHLFLHYLLMVDEYAEEHNDFIQRQSTKMLFEADRPFAFQQLNQLRLHLTRPQRRRLARAIVSAINAEPPYHPPHDDHLHDDDDDTDEAHGAAIARRQAFDPQPWRHLGTNALHKLSTVVAQARKRLYWSNKVRQWGNTSDRSILARCLYGKGSPATRQLRVFGPSPTPSFVRIHITLDDESFPHQVRQLSSMEYRVAQHQQQTKMETWKRKSGIKLVESQMPSPRTTQLDKLHDYLVYINTHLNDLLRHYSLKYNKARFEIRRATQKMDAEAVNILIHGGKKYQTQDPRTITSEENLSSTAKWRPSEQRARDRRPSLVFYGDATLDSQVFQGRRTQAGLPGRIKRLYQGANAQGRLVMINISEFLTSQVCSACGARSLSHLTPVDTERSLYSVLMCSTCRTKWNRDVNAAHIKATLTQRLFHAGRMKLGRGRGNDSLPHHLFLVPMWRAGVSASLCKSMRERKG

SEQ ID NO: 3621 - protein, 594 aa, Gongronella sp.
MDVDEDGRDDGMDVDVDHDDDDAPDDDPDVDNDDNDDDNDMYIATAMTTASQSTVGSLGVSNLAITMESCNDADALLDETAQSKVSFPWTRHVLQEYIPNDWAKLNHHKRAQLTRTVMLLINENVEPLPLRLSPSLSHASKDMVVHMVEETQAKIDKYTLVLPEIVVRPSLRLFTLVPVPSFRLRHIHIHHKKSLNKILLHFGLENYNAGGQALPCDGSTHVIFNMFNITQFHRSSESAFENALDTDGFSTSFTFKHVNPDPPPIVELDKITLEQLRRCRVWSVDLGVDHIFVAADGSSVNTGIYSAAPPTTPPPPAGPTRHRPRSIEEPALTTRAFDLLPSLRGQSVSVNPRQSDTSSASTSPRSRREYTTHTAHEIRRMSSAEYNKLAGVPQAKKWLHDRKEEAGIVVIESRLPTAQTARIDRVQERVRALLTTLPTLIAFYDMDHQKRRFSLYRGKQKANHEMVNIFLGGGRKYDMDSQQPMSSLPPIHRQQSQFTHNDPGDPPLIFLGSGQFGCRTRRAKPHGHAKRHRAMLNKAQRQGRVIVTSVNEAWTSQVCSRCGKRCMKNIKVFSPCCPFPKLHGDVKCQSCQTL

SEQ ID NO: 3622 - protein, 424 aa, Gongronella sp.
MGDNPVWTHHHDPLLQLLWLNWPWCALIVAIIRQVWTHSSSVVLFTQTAWVEYNALVGRLVFIDPGRRDMFFTMHEDSTPEDPLTYRYTANQLRKETKHRKYTSLVARSKPRIVQQAETFLSQKSAKFNSISSFNGYLNARAIASGPMCSFYEDLAATGGLNPRGHNPPFIRKLKFHRYMRRQQADARLVRTLLEQYTRVGENGQPILPAFVIGDWSAGNARFHEPVSTKRLTRMLVKHGLKVYKIWEYNTSKVCTTCQDHVNLLETFQPVQNPRPHRRASNPTVTRWGLLRFTSTGVDCLNGLARPRPVNLNISTRFWNRDLAACLNFRNIVQSLRNDQGLAFYESVRSATMESAFAGRQPSAQFLGGVPTRVRADAHSKGSLLQQGPNRLQTKLAMTVEDIVPQICRKLLPNQAHPHPFCIP

SEQ ID NO: 3623 - protein, 744 aa, Gongronella sp.
MAEIPPLQYCIIRPAALDEPGDTPTKFTTLKVPFGSVGWNVDHFQRLQDYVLQVNYLIKHQHQALKYIFLSLFDIHGDNLLSFDGVQNLHPDMSYLVNNNAFIQAVFTYLANGTIPGDTPVIVPGLETLLEEYIRLSQFQRTPFIGLVQNPATYASNQVQAEYLNNVQANLNRRVMLTLDKIFKMAEVRDWLRQQEAENIDADANDPDVDDELNDVFNNGEYAANLRLLKRQIGDANVNLADIQQTVDAIVNVVPAQHRGTMLQEGRALVNGLRHHFEQVDGTVHIQNYLVDVKYHPERYVNAFYLLSRHFADHEAPPGEQEDRINAYTLYNWYPLRKSWVPAAVQIDSKILCTSILGHPWRSVERHQRPPGHQNTQAYKFALWSQAVDFRLPVWWAQTYDNDDNVPTPAQWRFGEGTWGRFCFQGTIYTDGVSISILKTNRHTNASGPRRTFVPSARETAYIDELPPQECQELLDMSDGGLGSIVYVDCGRRDLMFCMASTSTAADPQVYRYTVNDRHKALGRARQRELIEDIPVNVAQAQQRMSTVTAKTQRLTAFIDYLGQQGAEWGVLHNHYANHQTRSAGNRGYTVPLYRKLRLNLYIARQQADQDLARDIRAAFHDNTVLIMGNWGAPHMRFHEPIRGVGLRRALKKMGFTVYLIDEYRTSKVCPNCMQRTVRQNPALVENPRPWQSTTGRVWGKLECSACPSILNRDSMACRNMITIGTAILNGEDIPEIFRRPAAA

SEQ ID NO: 3624 - protein, 1077 aa, Gongronella sp.
MTTRRKQNRDELEAKTAAKEAHQKALKEGSAKVQAPCGKCVLASDSQFDTARDMLAEHLDVLRGATGDEEDEEDQEEVTMAHRELMANDEEYAELFNGAKARLATAHTHSRASNHECIAYMPRQRVKTKQRAGGVTMRSFTIKNGLTTLLQPDIPQEDKTKFLDGMQKVVEYNRLMVIHAMAFVQHYIIAQLSADRQVPRGLFDSSFFYGVFQLLLGQPFTNKTKFNDAERAAILDAFRLFQHAHPAIHLDPVPSEHAKPCMFSEVLSASAQQLATHMKSHVVENFDTFYTNYLAASLARSLVQEGFDDVKPHITRGYAAYAYQRSVHDDDHPAEAPAYKMDARLKERIVELSDALVPETEAVWRRVAGYIADERRAIALAKQARQAAASRGQAARELRRTRQFSASSDNDDNGVDEAEEDVISVSTEVTVGSIGASNLSVAEIPPVIRVTTSAITQNPQFFLKVMYEILVMMENWNDSDALLPATPQDEVSFPWVRHVLHDLLDDDFKKLDHRKRTQLTRTVVMLINKDIEPNASRLSRSISSQGRQLVVQLVEDVQLLIREHNFIPHGILVRSSLRLFALVPVPSMRLRYIHVTHRILKTILGHFSLKDYNKGKKTVPADGTPHKVFELFDMTKLKRCRASAFENAFDTDGYATSFTFKRPKGEAPTNLTLENVTRQHLGQCRAWGVDPGVDEIFVGVDGSSYESGIYSATPSSIPPPPADRTADELALDADDNIILHAGPARRRPRSVSAPPLAVQAMQVLMKPDRKRAVTVDGHPCDANDPLFPRSRRDYTTHPTHEVRRFSPKEYNEMAGIPMVNGWLAEQKVASGVIDIESRLPTAKTARTDRADERVRALLQALPTLLSFYDMQHQAKRFSLYRGKQKAGAEMVNIFLGGGIKYTRPNQNTQRLASAPTATRKWRAAPFSPNAPGITPLIFLGNGQFGRRTWRGKPHGHAKKLRKLLSIAQRQGNLLVVSVDEAWTSQVCSRCGRRSMSNIPVLPLIGPSYKLHGVLKCQSCSTLWQRDANAARNIHAIATLNVLGRHLHHIFKDSNPSSRPLAFTRANAIPPPPSRAQP

SEQ ID NO: 3625 - protein, 892 aa, Chlamydomonas asymmetrica
MAGRVAKPGTKAYFKNLLQLNGVATSPKDTKATLMQKLREGALLSAGELMAYGKACGGANAAAEPATVTKAVTHITVVKCSLRRAMRNLDCPADDASGTNSTNRTNSTNSSKPAATMLARFKAIVDDHVNVISRMLRRGSLALAYHLVHRAANGDAIPDLYNMKTTYWKDWLRVGINDCYPSDDVKTTYPHIAQHLGFAMQSKSPDHLAALPAHFDQVLAYAATTFETAVANNAWVPLFNRIARLTKHTLRDLGVGLNTHGVSVFDVVSSIRMAHPSTASMYQFFPDEVRAFVMDVRRRLLAPDGQVLFDQYGKTVSFPTLFAFNHWMAERFSALKQRQNCLSPIFRVRRAHVRFDVKTLSKVFESLFPDCDAIAAVRSAANAHEGDVKKGGNGHSNPDEFMLPTDAPAKVLKLDCETEEAWNAYKASVDAYKERVETAKATPEYQDQKAKHDAWMRLRRDAVASFFGKLPKRVGQAGKDEQGWQFDGSIVTDGVGVSLQFSRQVMQTSVVTKGRGKRGPKASEDAADDAYDREMASTCFTLNGDDTVVLGCDPGRTNLATVSVIQLSGENGEACSKKTWSWSLSRGMFYDKSNTARANRRQRQRFRDHGLDGDWATLSGQQNDASLRSHRPDAILQYLEAYSAMEGRWWRAALASEESLANLRRYAGKRRVLDKFFANVKREAGQLFPGRRIVLAYGSAYRSMKATGKGETAVPIGSTYKAAVRHMQVVVTDEFRTTQVSWKTGNRKLVVYKKFDGTKEILCSTPFRAPPKVSPEDEESVDRYTTRRCHKEKQRRGGVVPALPRGEDDDDRGQDDDAVADCGRVDAVHAAKDKKTTKRYPEVRGLRFCPEERMYRDRDVEAALTIARLCTLRLQGKGRPTPFCRSTRLSMS

SEQ ID NO: 3626 - protein, 901 aa, Chlamydomonas sphaeroides
MSGRTLASKAFRVAAAIRAAVAADPLVTCARLARLIHETLGIRISPQLARSVLRAAGVTRKKARFHGAPVHHEATTAAFLAARRRYIEQGLTFWSLDETGFGRRGAPVFGYATRGHALRIQKRQQPCVTNTSALVIANAEGTMIREFQTQAYRVGTFVSFLTRLEVPRDAVILLDNLSVHKHRDVHRVAAEKGWHLLYVPPYSPWFNPIEGIFSIVKRAWYGGASIADAFDRPLPACKKRSRPDRAEKLRARKETRETVVKCSLQALLLGSKGQRNRVAEAIDTRVVAYSKRAVLASRGLNLLARNLFKDVQQHKDLVDFQVELDVVHVNTVRQLMLGTAGCARRVPLVHQLHRERPFLLHDPRDRSQSDCNIYTDGAVGFAANVHTHLKENLLRVVKRVVYDCTDGTRDQQVLALFRICGWPPPVPRKPKKPKKPKKPKKTRGAEASEEPPPPPTLTQAQEDRVKLCRDVLGLRGDTKITRAWLKAKANAPGILKFFVLALRLLEEHAPTAKPFALLPICRRKRHFITIDTTSLFGIARDADLVRKGCQLPAFRALGDAHWCSILDVSRVAPRGARFTGTIDTDGVSVCVHFARPKQPKKQRPANEEEGCGGGRADRLASRPSQEKIDSSRVVVFDAGRKNILYGVEILPDGTVQRYRLTRRQYYQESGIASAAARTEAWHRGVRAQLLALSRVSTKGYRVADFEAYLAVDMAVATALWREYLKRRWAAQRLRLHGGKKRVLARFFNRIEEAGRARGDARPILAAYGSAKMAPGGKGEVSVPVSGVFVECQRRLETHLVDEYRSTRVHHADDHVLQGVGVVRRKPDGSRAAATVRGLLWCSSTKDARSSAGSGKFIDRDENGALNILRCFLLPQRPAALDRSACRGQRLPVATVGKWVRR

SEQ ID NO: 3627 - protein, 311 aa, Chlamydomonas sphaeroides
MGKDTCSPSQLTDAHALIESCDYRPMVEPLQRAGGAAAGMLMCSCGMLVVCAVAAPVAPQLVVLLVALGLFVFSIFNTACSPLPTIGLFLVTAVFGPRKAPALSALGKPSDKGKQGSGSAPGGANAATPQGKSPADAEAGVRFSAAELKNLFLCGLDPGASHRHQCGYLERRQWMEWQLNYQPQLAAYQFAIPSARVAIRAAHEMRLRHLFGGWGGLGVQDFLAHYFDPRQRKKRLEVYIGEQRVLHREAVRLTGGRPKDKVVVGWESGSAGWNSVISRQGQPPRKEFVRLLRERYARHVVIIDECRTSQV

SEQ ID NO: 3628 - protein, 260 aa, Chlamydomonas sphaeroides
MQRPARRPDGEVQEAEAGVRFSAAELKGLFLYGVDPGVGTYWTCAKGFSHVSGFTGDLLQAAGCASHRQQCGYLERQQWMEWQLNCQPQLSAYQSAIPSARVATRAAHEARLRHLFGGWGGLGVQDLLAHYFDPRQRKKRLEVYIRKQRVLHREAVRLTGGRPKDEVVVGWGSGSAGWNSVISRQGQPPRKEFVRLLRERYARHVVIINECRTSRVCNNGGCGQLHEEFLPGARSAHGVQVCQGCGTTWSRSGGYVRPVG

SEQ ID NO: 3629 - protein, 1557 aa, Chlamydomonas sphaeroides
MAEALPVTVIWPPCPPHLGRISAVTADAAAGLIYTGCEDGSIVRWQLVPGAPARAQVLLAGHTAPIRHLAAGLTALDPGDGAAGGSRPRRLLSADDSGVCCLWREPEGRCELRRRLPELGPGLGLSGALLAPQHAGVLSEGWLLAALPPTAPPAAAALPPPGSDRNFSFHRTTHVRGSGSGSGSGHDRAGANGTAGHCVAAEAAEARPPVAVVLDWRSLEVRQLLPMRPLQQLAAATMAAAAGLAQDTAAAAAAGTDPFLCLSLSGCDEGAHASQPAADGCAAALAVAVTASGCLYGCVVPHDPYAAAPRELLGPADAGADGEPDASVAAPTDCGGPLLAAALGDGLRWAVLASADAWLVFRARTGPAGHGTAAYGRVRVSYELVCRISLLHQSAARSWSLAAQRQVPRGRRHAPRMLRFQSFAVDLEAESGDGSEGSGSDTDDEARGPGAFSNGVGGAAPARAAGLCTAAPPPHACRHAVRAASHLLLARCPPAQQHDLGGAGSAEVAPAAGGEGADDRSGVLLEVLAWDGSGRQQLVTIAAEEDRVASVTELVALPAAAGEQRRLPLQRPSGAVTASHCCVMPLPQPGPAAPLAPSAAADGAASGLAVVAVHSFSASGVGGAPAVLQWQLPPPLCTTAAADAGQVHEREAAEPPSDLQACVGTLADGCGLGDGRAVSLDRGPWSFPYGMPDAVSWSFRRGYLACGGRDPSGAWCVAVFDLTPAQPSLDRLITGPDAAALLPPPPPRAAEAAAEAALAPPTASGLSSAARQPPYHPTSGLPPPAVVTAASSSTAALPPAAALGGSFWSLSCSRPDVLLAAVDAETALAAVAAATAAAAVPPAGRSTPMAVPLDRRRSLSRGGAANGGWVLSPTTSASTAPLGNGTPGGMSPASATPPASRSASLDIHSGAVLGMPPPPAAAAALRCALSNGGSGGGGGGSGRTSLDAGSAAAAAASAVAAAAAVARPNATLTALLGLLHTWGADGAADAAVAAALVEAGVAPVAPPPVVAEGCAALLAAAASVDVAAFVEALSRGPMGEGVPPLHPLAAAALRRLAASRPGRAALAAAGPRLAAVLAAAAAASCPGGRPRPDLPPPLARCAAFAAADAAAALPVLALHAGGMQLAAASPLPLPRRTEPAAQSAQHHSYVTVYDLEYGSVTWQLPLTPGPDALAPLPPAAAAALPPPPPAPASAPPPPPAAVAAQLRGLAGAGVVALAFSPQLAQPAARLRPARKRPAAAAARLRLAARKRPAAGTGGGVAKEARAQLDLLAHYFDPRQRKKRLEVYIRKQRVLHREAVRLTGGRPKDEVVLGWGSGSAGWNSAISRQGQPPRKEFVRLLRERYALHVVLLNECRTSQNCSAMATVEAASVEPSAPAPVPEPETQTSAAAAVAAVAGQHPHEDEDSSAFECNICLELAKEPVVTLCGHLFCWPCLYRWMQVQAYSRACPVCKAGVEIDKVVPIYGRGSEPSANPQEAVKPVPPRPAGQRPTPIVPTAVAGQQQQQQQQGVLPSLFGFHLGPGQGYNEALTPEQQHQAFLSRLLLMLGSFVIMCLLLF

SEQ ID NO: 3630 - protein, 237 aa, Choanephora cucurbitarum
MSLIQINGYSIRFVLDEKYVELAPKDLIEDIYGVALIWMLIPGSLILLLLAPLLMNTTIHEEFETPLTEYYSLCGYHIASKEKMPYQKYHQESFQFFSQLPSLKTSDINQFARASIARYLNHELISDYYGKDCWLSKSKFQVYVKKQKATYEISNRLFHGSKKYDKDNIVGSKQKNDFKWVSSPPENHDAKSRMPIIAYGNATFSSSMRGEVVAPTKRITQAIRKLANTMAKLNLFM

SEQ ID NO: 3631 - protein, 312 aa, Leptopilina clavipes
MFDFSKTERGKEGAFSEAFSTNGVDVSVLFDVPKEKKSEDVNEEKSLPEKQKYKIFYGFDPGKKATLGGVYRLGSPNPSSTDKSKDKHLYMKSSSFRWEMNDHKRKETKKNKFGLDLQDFYKNYVIENPDMSNFSLNNPRDYERIVKYKLYVFHTFQTQHEQKGLVRLKMDKYISRQRQCEKIVNYIIGDTKRKPCFVAFGNASLSGVTRGHIGTPLNQLKRAFYLRAKQQGDRRLKIVTVNEYHTTALCSNCCFLMDRSVSPHRFMRCNKCLTTWERDINAGRNILNVALIDEKIIEKAEPFTDATFYYRK

SEQ ID NO: 3632 - protein, 545 aa, Candida sp.
MTDDVNIDPTEGTEEAWVVIDLIYAGMVMVPLFLIRQHLMFPETANINSSPNGTILKEESTEIGSSTSLVDEEPTSSIVEPRSSAPSSLLATWRVSKPLIQHRAHQRDGFCDPMELLAEANAGPYICHCKEHGVECGHQFDSIGKLLQHLADHYAKFMAEHGSTDESPCCKKKWAKFNTVRFIDHYLSNHMPPGSKFFECPDCKKPFRSSSALHRHCNEQKHTKPVPPAWKNAVPEKLTVLRHWFLASVAALTVITNKSVVLLVRAWWDQILDEQPYLSWTDPSSWTLFPVNFTAKFKHPPYNELPETITKRGRLVYTIDGKYRLNFPYEFAKRPRGHNNQDVIAAIDPGVRTYYSLVDSEGTGKSIGHGYRDTLNDQWDEITLLRNLIIKHSENPRKIAELEAQTARLMMRSEEKRAQNHGRVASYLCRNYQFVLLPKLNFNSKTWHMNVARRKAFLRLAHCECLRRVTQKAHEFEGSTVVIQVCESYTSKVCSSCGALNSPKASEVYECQECHLKVNRDLHGAKNIMLLYAAAVLSAFLPGRS

SEQ ID NO: 3633 - protein, 544 aa, Candida sp.
MSSSIERKKEALRQVFLGELILPSATVLEYIKSVYSSQESLEKRQDEIFEIQKESNWFMQSPYPRYLSEGWNLPGPNAPKETVDCKSAASRSYQRIDGDPTVRELCYTLLTALREDGFYGSYVPFNGKYRQTGDPLRLVDESESGLIQQVPFRLKLTTQQKIRCQDYLVQGRDLYNLIVLATNDRLFYDRRVDDHDFNIIEWFRGIRNNLTNQSAYLPPELAWIALMTGGLKNSVVWDVRNTITSMRGRWNKKGQSFSMTLHLKDPKRTRGQSISVPSACWCSKADDLDFIFNPNHEVVCKAGDKDIYRALPKEVKHIFRLKYGDDRNYYFIIPMKVSRPRIDNRPSSNTVISIDPGFRTYYTGVDSNGYVVAYGENLSLFNYIDQLLTAEDTAKRRPTWSNIKKYEKLFTQRKQAMTDNIHRMASHLSRRNAFIIIPRLNWNRFVSLLANGNSSALAKYSHCEALDHLIWKAKSYESGGPTVIEVDEIFSSKVCSSCGHYFRSLGDNEVFDCPACPLVCNRDQNGAKNIGIKYYSALLRALLD

SEQ ID NO: 3634 - protein, 463 aa, Porphyra umbilicalis
MAKHVHLVYVDEHNTSQTCAECGHGLCNTYVSPDLPVDLTPLKAASSYAHRASVSAAKRASPHRGGRRARRGVTTGSRSGPRDGAAAQRAKEHAEAVRTKVLQAIAAHGKWAFGTDPLALWGVKLCTNVACPASYVGRDTNAARNMSKISIKSMQGRSIYPHIRGYTVSRAPPQEDPVQAVRHAAAIDVGTYEAGYGWTRCSPTSCERWRRPVVTDPPVAEAGTAPTAVPVAAPTVRVEALGVVADGAHDAAAASASGDLAPSNVGQIAAASPAPAVGHSHSSSSRLERAASLLTSSRGDYWLSEKRMLIQDPRHPPPVVADAPVFAGSLTTDRPSSCPHPRAIFGWQTATVHLPSGPAVAAEDHTGIHPLGRVIPNASRQPMGCTEKPVAKDAVHSACPSVNRPLRALTQRHDNQWNGQTCCSQVTRKKVLHYIVNTSVLIGFLRYAREYVRSKRPVTVGHH

SEQ ID NO: 3635 - protein, 302 aa, Porphyra umbilicalis
MAKHVHLVYVDEHNTSQTCAECGHGLCNTYVSPDSPVDLTPLKAASSYAHRASASAAKRASPLRGGRRARRGVTTGSRSGPRDGAAAQRAKEHAEAVRTKVLQAIAAHGKWAFGTDPLALWGVKLCTNVACPASYVGRDTNAARNMSKIAIKSMRGRSIFPHIRGYTVSRAPPQEDPVQAVRHAAAIDAGTYEAGYGWTRCSPTSWKPWRRPVVADAPVAEAGTAPTAVPVAAPTVRVEALGVVADGANDAAAASASGDLATSNVCQMAAASPAPAVGHSHSSPSRLERVIVDCSPGSSRGV

SEQ ID NO: 3636 - protein, 274 aa, Porphyra umbilicalis
MAKHVHLVYVVEQNTSQTCAECGHGLCDTYVSPDSPVDLKNLKAASLYAQRSLASAAKRASPLHDGRRARRGVTTGGWSGPRDDAAAQPVKEHAEAVRTEVLQEMAAHGKWAFGTDPLALWGVKLCTNVACPATYVGRDTNAARNMSTIAIKSTQGRSVYPHIGGYTVSRAPPPDDPVEAVGHAAAIEAGTEEAGFGWTRCSSTTWEGWRRLVVADPPVAEAGTAPTAVAGAAPTVRVETLGVVADGAHDAAAKAASGNLATRNVGQMAAASLV

SEQ ID NO: 3637 - protein, 295 aa, Porphyra umbilicalis
MSNHVHLVFVDEHNTSQTCAECGHGLCNTYVSPDSPLDLTSLKAASTYAQRPSTSAAKCASPLREGRRARQGVTTGSWPGPRDGVAAQRAKEHAGAVRTEVLQAIAAHGKWAFETDPLELWGVKLCTNVACPATCVGRDTNAAPNMTKIAIKSMQGRSVYPHIRGYIVSRAPPQNDPGQAVRHSAVIEAGTYEAGYGWMRCSPTSWERWRRPVVADPSVAEAGTAPTAVAVAAPSVRVEALGVVADGAHDAAAASASGDLATSNVDQMAAVSTALVTAHSHSSSSRLERESQTVH

SEQ ID NO: 3638 - protein, 302 aa, Porphyra umbilicalis
MAKHVHVVYVNEHNTSLTCAECGHGLCNTYVSPDSPVDLTPLKAASSYAHRASASAAKRASPLRGGRRARRGVTTGSRSGPRDGAAAQRAKEHAEAVRTKVLQAIAAHGKWAFGTDPLALLGVKLCTNVACPASYVGRDTNAARNMSKIAIKSMQGRSIYPHLRGYTVSRAPPQEDPVQAVRHAAAIDASTYETGYGWTRCSPTSWERWRRPVVADAPVAEAGTAPTAVPVAAPTVRVEALGVVADGAHDAAAASASGDLATSNVGQMAAASPAPAVGHSHSSPSRLERVIVDCSPGSSRGV

SEQ ID NO: 3639 - protein, 277 aa, Porphyra umbilicalis
MAKHVHLVYVDEHNTSLTCAECGHGLCNTYVSPDSPVDLTPLKAASSYAHRASASAAKRASPLRGGRRARRGVTTGSRSGPRDGAAAQRAKEHAEAVRTKVLQAIAAHGKWAFGTDPLALWGVKLCTNVACPASYVGRDTNAARNMSKIAIKSMQGRSIYPHIRGYTVSRAPPQEDPVQEVRHAAAIDAGTYEAGYGWTRCSPTSWEPWRRPVVADAPVAEAGTAPTAVPVAAPTVRVEALGVVADGAHDAAAASASGDLATSNVGQMAAASPAPGV

SEQ ID NO: 3640 - protein, 300 aa, Porphyra umbilicalis
MAKHVHVVYFEEHNTSQTCAECGHGLCNTYVSPDSPVDLTPLKAASTYAQRASASAAKRALPLRGGRRARRGVTTGSRSGPRYGAAAQRAKEHAEAVRTKVLQEIAAHVKWAFGTDPLALWGVELCTKVACPATYVGRDTNAARNMSKIAIKSMQGRSVYPHIRGYTVLRTPPQHDPVQAARHAAAIEAGTYEAGYGWTRCSPTSWERWRRPVVADPPVAEAGTAPTAEAVAAPTVRVEALGVVADGVHDAAAASASGYLATSDVDKMAAASPAPAVRHSHSSSSRLERIVVDCSLEGDG

SEQ ID NO: 3641 - protein, 304 aa, Porphyra umbilicalis
MAKHVHVVYVNEHNTSQTCAECVHVLCNTYVSPDSPVDLTPLKAVSSYAHRASVSVSAAKRASPLRGGRRARRGVTTGSRSGPRDGAAAQRAKEHAEAVRTKLLQAIAAHGKWAFGTDPLALWGVKLCTNAACPATYVGRDTNAARNMSKIAIKSMQGRSICPHIRGYTVSRAPPQEDPVQATRHAAAIEAGTYEAGYGWTRCSPTSWQRWRRPVVTDPAVVEAGTAPTAVPVAAPTVRVEALGVVADEAHDAAAASASGDLATSNVGQMAAASPAPAVGRSHSSSSRLERVIVDCSPGSSRGV

SEQ ID NO: 3642 - protein, 491 aa, Mamestra configurata
MSLTCKTCGGSDHTRISSKKCKEYLPPIRKRHLSDAGAELEIYTVKRGFVSSLCPLLESEKKLKLLTEIRRDVRDLSRVYIELGVWLNFYMKTATQLPSKPDVLNFIYAMKGKGPYADAYRVMFGDRKYDDRLRSFVVQEMAKQYETVLHTNISTHAYARLARYFNVKRNDPALYAAFFKKDLPEDNEEMRRVCTIINVDTVGGAKWWSTIHEWLKIQAKLEDFKLFPQPSHGLKHLTYTSRGWHELLRRVDPKSITSYWTRIVDHRRELWSPWLDVDMKKFGCSLQTDGISKTYDRVIAVDPGSRIPVAAVESKRLQFRRITKKYVRSHTLEWKRERIRNKLCRVSEEAEQKAREKLTFPVSSKNTIHVVEYTVFRMTWFDVRQEPYEKHAKLTRLGLDKYLRTAKCEEKIIKEVFDGGGVESTLVLYGAGSKFMNTASFSGRKFKHDSLIKRLRSKRNIDVEVVDEKYTSQACSSCNAKTGVSEDRHES

SEQ ID NO: 3643 - protein, 348 aa, Ammotragus lervia
MLGDKIDHYKTTKTTLNNTPAQYKKEFEWLKEVDSLALANVQQNLRAAYSKFFKQGAGFPKFKKKGIKDSYTTNNQKGSVAVTKNTVKLPKIGHIKVKIHQSVNGLIKSATISRTPSGKYYVSLLIETIVNELPKTHSNIGIDLGLTDFIVLSDGSKVANPKFLSKLQAKLAREQKILAKRRAAAKADQRKLSESRNYQKQRIKVAKVYEQITNSRKDFLHKLSFNLIKNHDVIAIEDLNIKGMVKNRKLAKAISDSSWSAFTTMLTYKADWYGKALVKIDRWYPSSKTCSNCDHLLNKAELPLSVRTWDCPSCLQKNDRDINASINILNQGLLLAKQSKTVGATGLA

SEQ ID NO: 3644 - protein, 384 aa, Ammotragus lervia
MIRGHIIELKPNNVQANHLARACGVARKAYNWALHEWQRQYALDKAYRDACLAAGVEVDTKNLNKPSQAKLRRELNAIKRELFPYMLEVTKCAPQAAIMQLGDAYNNFFKGLAKYPTARKKGRDDRFSLSNDQFAIKGKSIRIPNLGWVRLKEALRFDGKIMSATISKRGGKWFVSVAVEIQKAVIPTKKTGKSVGVDLGITDLLVLSDGTKIKAPKPLQANLKKLRTLNKALSRTKKGSKNREKAKTKLSRLHYKIRCIRQDSLHQITTSLVNEFDVIAIEDLNVKGMVKNRRLSRAISDLGFFEFKRQLIYKATEQGKVVKSVGPFYPSSKTCSNCNHILGKDELTLKMREWLCPNCQVSHDRDLNASINILNNATVILTAA

SEQ ID NO: 3645 - protein, 308 aa, Chlamydomonas eustigma
MRRSHVLRVLNRYVKRRGNPPADAGGHGDVFWFDTFDFRKIKPSRSNFAWSITTDGVGMCTTFEMPPVAMGSALAASYSPSPGDVVIGNDPGRINIYYMVGLYGGNPAVMKLTRKQYYTESGATSARASAGRPTSGASGRHQEALWSEYLKPRWARLRLSLYGGKKRVFANFFNRLSVRLPFPAGGRLVIAYGNAKFAPGGPGEQSVPTTRAYKECASRVATYSTDEFRTSKVHCRDDSTLQLLRGSDRRFSLRGLLYNPDLNKFVSRDLNAALNIRRCLVGPKPAILCREGVTQRLEQHIVKVLRRR

SEQ ID NO: 3646 - protein, 226 aa, Chlamydomonas eustigma
MRPNAWYICLPRELKPEKRKPVFENAAYKACFIDPGVRSFGTFYSPEGVCGKYGEDFTNLHLQSISDKIDRLKSLASKSRFKTARNMRRRCQKLRNKLTNKVTDLHWKTCTFLTTAFQKIFIPKFGVTGMVGHHRVIGCKTARQMLELSHCRFLERLRHSARTKQRTVYIVPEAYTTKTCGRCGVVNENVGGRHIFNCPSCDFKMDRDLHAARNICLSTMSKMRLF

SEQ ID NO: 3647 - protein, 487 aa, Notospermus geniculatus
MKRQRPVLTLWEAAHVKGHSTMWKWWNSIRCRDLTVRDATVGLDLTDFASKKKKSDDKKVMTTFSVGLKPTKNQRLVLEEMLRSSNTAFNMCSYLVEQKEVKPSQFDLQKFVCKAKVQDVDDSYRVPGDDWLYREGGNPHTTIRLTACKMWCANYKSAKTWQKKRNKTGERIELQRRNQVDPYTDSFQVQKLYARFLSDEDLKYASDKSKFRRRYIRLLPQAFGGLRNPKERFLKLKKTTSKLPPIDHDVTVSKLPGGRFVLRIPCEANYTRTATRVPGTENAMCGIDPGGRTFATVFDETNKAAWQVGLVEDKQHLIRPLMDKIDDQRRRLSLAKSRTQTQSGKDAGRCMAKLHYKMANVANTIHATLASHLVTNYGLVSLGDISVRRIVLKDKSGKGKLSKRAKRDLLCWRHSAFRNRLVHRALGTKCSVVLQDESYTSKTCGRCGVKNEKLGGSETFKCSQCQYEVHRDLNGARNILRKTLNIF

SEQ ID NO: 3648 - protein, 233 aa, Notospermus geniculatus
MRVDGKFVLLIPCDANYTRTAKRVPGTENNMCGLDPGGQTFLTVFEETNCCAWQVGLVEDKRYDLGPIHREIDETHRRLTMAKDRRQEEAAKGLRRHLARLHYKITRTIDNIHDQVASYLVTNNGLISLGKIGISDIVRKDNPMSNIGKKVRRDLLTWRHYAFRRRLVHRATGSDCVVVVQDERYTTKTCGRCDMRNEVGASRTFQCKSCGYSVHRDVNGARNILRKTLKLMK

SEQ ID NO: 3649 - protein, 487 aa, Notospermus geniculatus
MKRRRSALTLWEAACVKGHSTMWKWWNSIRRRDLTVRNATVGLDLTDFASMKIKTDDKKVMTMFSVGLKPTKNQRRVLEEMLRSSNAAFNMCSYLVDQKGVKPSQFDLQNFVCKAKAQDVDDSYRVPGDDWLYREGGNPHTTIRLTSCKMWCANFKSVKTWQKKRNKTGEPIELRRRNQVDPYTDSFQVQKLYARFLSDEDLKYASDKSKFRRRYIRLLPQAFGGLRNPKERFLKLKKNTSKLPPIQHDVTVSKLPGGRFVLRIPCEANYTRTATRVPGTENAMCGVDPGGRTFATVFDETNKAAWQVGLVEDKQHLIRPLMDTIDDQRRRLSLAKSRSQTQSEKDVGRCMAKLHYKMANIANTIHATLASHLVTNYGLVSLGDISVRRIVLKDKSGKGKLSKRAKRYLLCWRHSAFRNRLVHRALGTKCSVVLQDESYTSKTCGRCGVKNEKLGGSETFKCSQCQYEVHRDLNGARNILRKTLNIF

SEQ ID NO: 3650 - protein, 503 aa, Notospermus geniculatus
MKRNRPPSLTLWEAANVKGHKNMWHWWRGLRRRPLGTGNGVGLTTDDFQLGISPTDEMGRSVSPKKACNGDPPKVMSTFSVGLKPTGHQRRILQEMIRASNLSYNTCNYLVYDKDLKPTQQVLQKLVCKAKAQDVPDAYRMPGDQWIYDNNNAYTTIRLTACKQYCVNYKSAKTNRRSKRASDEKLRDRNVIDPLSGTIEIQKLYVRKLNENDVRYGRTESGKRFIMKRHLCIIPAAFGSIKTPSERFLKIAKKRVDSIPPIEHDVKIKMRVDGKFVLLIPCDADYTRTAKRVPGTENNMCGLDPGGQTFLTVFEETNCHTWQVGLVEDKRYDLGPIHREIDETHRRLTTAKDRRQEEAAKGLRRHLARLHYKITRTTDNIHEQMASYLVTNNGLISLGKIGISDIVRKDNPMSNIGKKVRRDLLTWRHYAFRRRLVHRATVTDSLVVVQDEAYTSKICGRCDTQNKDLGVSRTFNCKTCGYSVHRDVNGARNILRKTLKLVK

SEQ ID NO: 3651 - protein, 1129 aa, Apophysomyces variabilis
MDRLRQALEKADRIPRGSFEEADKKAGVPKGTIEKQIRSRLSSSHKTGEFWRQCAVDNFDDVLAVVKAEGKQNRPKKKDEDSDNLFRTCTVPLKSVLRPDLDENLKRIFMHTVESTSVQMTDYVSDLATVVRATMLKYVSVSLSLDPASGSVKAELDQTSTGFDIRTVVPKEKLRDESMLVDDYFVPVAPMPDNLSQFLDEMPGRRNNDLLSMFNENHIQFLHGLYFGTKGNVSKEKHYLWMQFHDQTLDNQPVIPDGLCRTSHFYMKQFSTNLKNMWAGSLYNRSMNHLLRVLLRVNLAPRREEKVREIREKAKLAREKEIEQQQVIKYQYRKKAIKRKLKNEKKQLRNLKKQIEQEEEDDILVRLATRAATCAEAIERLENQLLARSESRSNPKSIKVEQMNNRASVTKEEEQQAKILISLGETHIGVFEQIEEELEEEEKEETSEPSRRKLGILQAITKALLQSDKISGHVTVEDVLATSHADDAFSPQEIDTVVNIANALRPYVIRGQIAPCIPLRLNFVVLANALLCSIGYQEFTASICPTISPASVHALPLDAVAMYEMFGSSYAQLDIYKADGSVFTNRDEAIAEKRTVIGSFFNVEAIEKTCKERGLVPRWRITVTPQKTAIIDGNVCEQRRPIESRYEARRKKYYRKKEPYVQEPSIEQQSTPELAKTLDDTKKDVKTLETLKCQHTKLVKEATKLVAGLRSSYQENQAICQKRIRDKRKADKHENVTEKEAAYQQQKLSYEALKAAKLNWSNQQMALNQVHDRLANARRKKYKLEQNRTVGESASKEKSGRCPGCEDGVGRLDLGPLLEDQNNILTFSGTDYGLQVLLTTVPITRQRADFHLQLYNRYSMLGVNNVNDHDDDIDVSPTDMLQLPKPIRITAKLLDETTLARTFRKKRERRKKSNTEVLAAEEQLKEASMEKAMSVQDIIRCQKIGRSCRKTLRDFYHSNRWHKEKVIQDLYKERIYDRVAANERRKIAMEAGPHDSGRRVIPVMAIGTQGTCVGSRLKGHPKREGKWLRARHRRRYKEIKWRTMNGSSRCVNSKCVTFKAGRTTQNRDVQAAVAIGLAAISNLFSAERITLPPFDPSHFDAGISNIADTTVQRCVQSSSESHHIGRCYC

SEQ ID NO: 3652 - protein, 372 aa, Apophysomyces variabilis
MFQQHTFTGWWKKFKSLPEVETASLEAFIKETIDAIESNTFAPEKYTDPKGTRKFTLLPVYSFQMRPITIDNQALARLLFQAGRRDNQTPVNPSETRREYFYLFDMAKIGYPTYESLENEKTMFWDVIRTDGVDVEFVFKKYREPFDPKKKPLTPANLKGKYDNAVIWGVDPGVSSLFVAADGNPSSPHRVRTSTTIEYYSICGYNRANQRRKQYMDAEPEAKKLIDDIPSLKTSELRKLTDSVKYVMQHYETITEFYSRDLSSQNRKKPNEKKWVAHCPNDEQDERNGPIIIAYGNGTFSGSMHGRVAAPTKAIVKELKHQAFRRKSPAYVSVVDEYLTAQICPRCKEKASKETRNARMQMVKKAREYMLC

SEQ ID NO: 3653 - protein, 910 aa, Apophysomyces variabilis
MVLRGDVYQFIGYDNYSTQINLADVFPADYDFGDHKAKHSIVSLPFINADAAVDSNIFTFAQFQNMFYSTVGGIYTEQIPKPWFSINGVLSSLVDPNDDAVASQFQADSLRALYTAANNLYSGSLYPRSLANVIRLLLRVNLAPRRMSKYMQLVKEKAEEKKDRQEQRQDLRSNVQRRRNRSYWTKELKKAYMNGRPDNVVETIQRKIADNLPRKDRTEDQKKSNEEEIKSQKADDEYEAFRLDQAEDDLVNDSEDDEDTAATTSSQAPITSKETSARTIRTLVAIVRMLVESPLIKRTISAKDVADAVHTGTILTITEQQVAAKVANFLKPYTPRRNEPDEPPAKHILTVLPIAALSNVVSTILGMQDRVNKLTIETSNKWALPVKADGIYKIMIDAFDIPTNRQGEFITSGLQARTEKETVFKAFFQMDKIHRMMNRRHLFFRWRLVFVNEWTVRVVGTINRNTPHQVSALQERRNNQRFVEPEIELTLSKAQLQERIDRTQASILGLEQQLKPIQKEIGALEKERMNHSTSAHGRTNSTAYRKLKQTRQQIRSKQNTAIVLQEKLKQARRDRYVLNKAMREVSRKGKGKEKRSASTSRSRKRKRKKQKRSSQATSSAKAKITEGYMPQMLSLVKPLFEKHSIPVCGVDPGIRTIGVSTSTTSAWMIQRIRNFTSNTTTELRHDIYNTWSLRASAVNHHSRSSRHRLRRERAKNAEKEGTEAENRRIEREKRTREVFTQKAYHKYADIERMHFPPDMIFQKAVHFYGHWQPTNSRIRGHARRGLKRLRGVQRRKGLVVIVNEYNTSKTCHWCLKPLQLQKYRGKDGKVRKCNGAVCCVNPNCVTVVNGCSTMNRDGNASKNIALKGVSMIVSSDGSPIPVFNSQYSSNYKLAQQFASQPTPVRLLHGP

SEQ ID NO: 3654 - protein, 230 aa, Apophysomyces variabilis
MKGKFDDALTWGVDPGVASVFVAADGTHDSRHRVRSISTEEYYSLCGFNHASRVREKYNKQEPAIEDVIDKTPSLKTSDLEKLIISIRYCIQHYDIISEFFSRNQSSDSKENICKSCDSKWAPLSANDRPEEKEKPIIIAYGNGAFSGSLKGRKAAPTKAILKELQRKARQRKAPTFVFLIDEYLTSQICPVCQKRNLQNAKEGKDARGQEGSKIHAVLTCSNKSCTTMF

SEQ ID NO: 3655 - protein, 282 aa, Apophysomyces variabilis
MKNIAMRSYHHPRKNFTKLAHYNASKAIMDRMKNEKPKIQQIEKDMPSARTASISQFDRYARFLLLHMSTLHQYYDKRHIDRQQASDEFAERLISSGSKYPTKNTRNQRRHRKQKKKLRKRQNKTKAGTVKRTEISDTEPSCRRLDSSLENRSRISCRRLPNIFASTLKGTRAGISNIIRRKIKENEARGRCKVVDVDEFKTAKIWSGCGAKKLRNVKGSLGQSLHAVVHCEQCKTVWNCDCNASRNIRRVAEHMALNNNNRPSPFQRKNQLPGQTPSKTCK

SEQ ID NO: 3656 - protein, 278 aa, Apophysomyces variabilis
MRMLPANGHEKYSHEIISSSTKEFYHFAHYNASKAIMDRMENEKPKIQQIEKDMPSAKTASISQFDRYARFYCCTCRHYTNTTTASDEFAERLIFGGSKYPTKNTRNQRRHRKQKKKRRKRQNKTKAGTVKRTEISELNRVVVVWTLPWKIEVESVVEGCRIYLRGTRAGISNIIRRKIKENEARGRCKVVDVDEFKTAKIWSGCGAKKLRNVKGSLGQSLHAVVHCEQCKTVWNCDCNASRNIRRVAEHMALNNNNRPSPFQRKNQLPGQTPSKTCK

SEQ ID NO: 3657 - protein, 412 aa, Apophysomyces variabilis
MKAICWDYVVEVIVDGEPHWPTTSVSIVYIRAVNAAKTVLDELSHHIHGPCRPANVPASPGSYVPVLRFILQSFPLAHREAEAASALVGLAGIQDNDQQSITPPRLFSLVPLPSFGWRSVTINGNALQIPSSARRPSNNHESTDKYEANFNLFNQCFDLEKYGFGRDNQQLYCNQTMTDGFSVHFQFSRVKSTQSHSEEQIRLQDLTTDEVAQFYRPVAVDRGIGHLFTASYSHGADQHEIRKCSTAEYYAVTGFYHSGRGHSRFHNYQSRQRAREEVANILLHGGKKTAESAVRSTTSNRRFPRWKKTKVKFDNDGKMPLVVFGSGMFGKGQMNRTLTKLKTLDGVTHHSVLDCKTCGTPWNRDVNAAKNLFEIAVSVWSTGNRPAVFSRPVPDETRTNITVANAGSPTGI

SEQ ID NO: 3658 - protein, 238 aa, Apophysomyces variabilis
MDCRKKEKPKIQQIEKDMPSAKTASISQFDRYARFLLLHMSTLHQYYDRSGRQQASDEFAERLISSGSKYPTKNTRNQRRHRKQKKKRRKRQNKTKAGTVKRTEISDTEPSRRCSDFSLENRSRTSCRRLPNTFARRKIKENEARGLCKVVDIDEFKTSKICSGCGAEKLPNVKGSLGQSLHAIVHCEQCKTVWNRDCNDSRNIRRIAEHMARNNNNRPSPFQRKNQLPGQTPSKTCK

SEQ ID NO: 3659 - protein, 619 aa, Apophysomyces variabilis
MNPKAVCRHCGEHGHKLKTIGKKRKATEVDTEEQKAEKKKGCTSRDALNAKSDAARRQRRNRTIKQEIQVRYGNKVDRFSRKILFQNVVRPDFTGYSDALSAACKTLRDTCTNDIVENLQQTVCGFIIHRLQMLVPDLSKSSASRITYDYLYESIAGDKPAWPSCLENASFDLFLAIVNLRDFLIPLMPQTCTFEALSGQPGVCIPVLRAILEMYEQEHQHNDDEESGNLPRLFLLAPQPSFHFRFVTINAKALRALFQVRNDTDDYEGNVEIFNQVFDLNKYGFRSMNCKTFTNEICTDGFSVVFHFARSAKLNTVELELEDFTTEDINRYYRACGIDPGVRHLYTASYGAGETEHDIRRCWSAEYYCMTGSPQRGQQLQKQKRRQGIDTIESNFPSAKTSDIRKYNGRVDYFFLHKDVLFNFYGPNDRERRFRDHQGRQRADKSSNYSHNDGIPEQPLSVVRSTVNESRRARNWKQSQPNPDNNGKMPLFVFGAGMFGKDKCRYKGHRKAAVNKLWRILKRREARGEVLVVKIDQYLTSQICHKCKTKTLCNVVTEDGIKHHGIQDCKTCRMRWNRDINASKNMFYIAQSMWNGHGRPDAFRRPTQITATNAGPERV

SEQ ID NO: 3660 - protein, 851 aa, Apophysomyces variabilis
MYIIQGKRKDGVEKHQKKRAKIERNQANKNPNAAGPCASCNETGHLTSRSSRRRNHKTNIKEKVKQLLQSDSEMYTRVLPYESVVRQEHADRLRTRIVELSAFVREVICRAQMFVNGYIINHSRSEISVDVFSQNFWYSVCQLVLGKTITNTNPNFPESIRQEWLVYRALYSEIVYPLRGFVGYSHALSAAWPSIAEAYTSHIVDNFYGRISTYSLYKLQRLVPALSTSHARQIVWDFIMEVVANGEPIWPVHAVDLVSVYIVDSVWDILDELQAVIPLPYEQAALATSPGRYIPLLRHILASNNTTQHKQRISLPKLFSLAPLPSFQWRFVTVNSQALSTLASISLPTSNDYDSNLALFNQCFDLDRYGFNRIDSKQVFRNQILTDGFSVHFQFSRAKPVRTTMDEGIQLEDLNIKEVQEYFRPAALDPGVRALFTVSYGYSEESHEIRRCSTAEYYALTGSARRNNQLNKEKQTAGIKEIESKPPSAKTCGSVQYSESRGRFYNYQGRQRARDEIANILINGGKVYDRRRRKKTKRNRKERRRNRKKKKDKRVRGCQERLAGSPKRTEPSHDSNIRRPESSIRSTNTNRRLLQWNKQKVKVDNDGKMPLIAFDLSLLHQRTLQKMKTLDGVTHHGVLGCKNCGTLWDRDVNASKNLYEISLSVWSNGSRPAVFRRARDSQNDANITTSNLPAFDTLHATYPRATKKAWNGFWNARLPNTAHTILWRLYHNSLPYRQRLHELLPARFTSPFCPICGLVESQEHLLWSCPYKQPVWQRLANLFLVSPSHLTSASVFTVDPPPLPLQEHASIDFLTFIACVTMNIWRSHWAFVFDNTPFHPAQVIAKTIQDA

SEQ ID NO: 3661 - protein, 1295 aa, Apophysomyces variabilis
MLPNLNFVGNPGLNMGDAISRSPTKNYEQCMQTVIAGARGRPISKENRSKALQWLQARGIQTVSKLFNTSPLEAALSVAVVRCLGDKQHAVSLRLSDNQTIPANGLLRLIAIAKMYNIRVYLFSTQSKPKVIGNNQSVYNMSLLHEVDSHTGTSRWVPLYIARFTSPKLPGPETTIEKSPFISPAATMKNVVGERRKKKQRAPLGVTEEVIKDELRKEINKRIHLEFSRITRNKNPTRAALEKFKEKFMNRNKTPKGLITSSGSSDHLFKTLKEKYGTKASPSALEQHFKGPDKPVLLWNDMARFFYRNQLKKITDHEIQAASVKDSKRKASDIHGDDSEGDNRSGDEPSEDEEQSDDEDDNHQEYVRVATTTLRKLVRPDIDLDTVLRGDVYQFIGYDNYSTQINLADVFPADYDFGDHKAKHSIVSLPFINADAAVDSNIFTFAQFQNMFYSTVGGIYTEQIPKPWFSINGVLSSLVDPNDDAVASQFQADSLRALYTAANNLYSGSLYPRSLANVIRLLLRVNLAPRRMSKYMQLVKEKAEEKKDRQEQRQDLRSNVQRRRNRSYWTKELKKAYMNGRPDNVVETIQRKIADNLPRKDRTEDQKKSNEEEIKSQKADDEYEAFRLDQAEDDLVNDSEDDEDTAATTSSQAPITSKETSARTIRTLVAIVRMLVESPLIKRTISAKDVADAVHTGTILTITEQQVAAKVANFLKPYTPRRNEPDEPPAKHILTVLPIAALSNVVSTILGMQDRVNKLTIETSNKWALPVKADGIYKIMIDAFDIPTNRQGEFITSGLQARTEKETVFKAFFQMDKIHRMMNRRHLFFRWRLVFVNEWTVRVVGTINRNTPHQVSALQERRNNQRFVEPEIELTLSKAQLQERIDRTQASILGLEQQLKPIQKEIGALEKERMNHSTSAHGRTNSTAYRKLKQTRQQIRSKQNTAIVLQEKLKQARRDRYVLNKAMREVSRKGKGKEKRSASTSRSRKRKRKKQKRSSQATSSAKAKITEGYMPQMLSLLKPLFEKNSIPVCGVDPGIRTTGVSTSTTSAWMIQRIRDFTSNTTTELRHDIYNTWSLRASAVNHHSRSSRHRLRRERAKNAEKEGTEAENRRIEREKRTREVFTQKAYHKYADIERMHFPPDMIFQKAVHFYGHWQPTNSRIRGHARRGLKRLRGVQRRKGLVVIVNEYNTSKTCHWCLKPLQLQKYRGKDGKVRKCNGAVCCVNPNCVTVVNGCSTMNRDGNASKNIALKGVSMIVSSDGSPIPVFNSQYSSNYKLAQQFASQPTPVRLLHGP

SEQ ID NO: 3662 - protein, 521 aa, Apophysomyces variabilis
MIVIPSAVKEYEEAIRNHLTANFEPKTVQYLLVRMSDDKDEAFRWKSTVAEHNRDYVKSCVEFLQQSIGITEIDETKLNAEPHLFLPWFFQVLKRLEQKIFIAEPTAQKYVSPGYIHRMVDKKLPKRLVKSLEVNVRIAIRKRERLSLAKKFARVSETALSNLQEFIKEIGDAIDAGTFKPEKYTDPRGMRRFTMLPVYSTQMRHITMDNQALGRLMCKSGLRDTLAPVKPDEAREVYFKLFDMSKIGYRTIKDLETEKVLFWDKIRTDGTDVEFIFKKYKAPYDPKKKPLTPSDMKGKVREKYNKQEPAIKDLIDKTPSLKTSNLEKLIIAIRYCIQHYDTISEFFSRNQRSYSKENTCKFSDSKWVPLSANDRPEEKEKPIIIAYGNGAFSGSMKGRKAAPTKAILKELQQKARQRKAPTFVFLIDEYLTSKICPVCQKRNLQNAKEGKDARGQEGSKIHAVLTCSNKSCTAMFWNRDSMAASNILHVFLHMRDNANRRPGPLLDWQTHNSIQLEDIMS

SEQ ID NO: 3663 - protein, 1289 aa, Apophysomyces variabilis
MFRLSAMQVPHPQIRENKRKRKRVIQSNISLDKAIEALHDVFQNQLVTIISKELEDKPRKNTAKKARFQSEVEKQAKTNKILQELRTRLEKADRVPRTSLEQADDSINVTRGTIRRTLCFHYPEPASIGKLWRDYAAAHFNDAVAEARARLEEHGEVEEAGSSKEVTVNDDSKEEKEIIRTCSVRLSKILREDLDNQVKQTFLETIAITSEQATNYASELGTAVHATMLKYASGSVVLDAESKQAHYQQDGKTFNVLDVIHEEWIRHPELLNSELAIAVAPMPDNIKNYVKALSKKHNDEFLNLFTEAHLQFLHSDYFGRQSYKAQGKSFWSSLQHQGLKDLPKPPAGLSTVMHFQLKQYATDLQNMWAGGLFHKSINHLLRILLRINLASEREKKIQEITEKKLQEKEKQREESSRTMRRKKEWRRRKIKGRLKQERKSLRRLEKRLGIEMDGNQRANLLQRKKSCVEAIRRLEKQAKEKYRPKKADNQPHQKDEEARGDMDKLAISADISVMDDEGIEETIETAIEEAQDELEEVEIKTLKKEPSRRRLIRIQAITKKLLLSTDIDGNVQASDVSDIWNDNDELQKVEIDIVVKLANALRPYVPKGRLSSAISLRLRFVLLSNAILHATGYSKFTANICPTISPASIHALPLDAASMYEMFGSNSAKFNLYKEDGSTIDNIREARTNKSAVIGSFFDQEKVKHICNTRGLEPRWRITITPHQMAVIDGDVKKGRVIDTSHYEERKKKSKGKRADSASSQFEDKSGLDIANITCSLEDAKQRVKALESAEKQIKNALRQREEVVESRMESYRRSKDVARRKVRDKRKSEKFDIYDSRAKQKQTDIYKDLKAAKLERAKSQSELSKIRSQLADQRRLRYIYQKQLDILKKQQTNKETKPKDDEQEQETKLCKVASWNRPGCEANTEFLDISELHQEVKQDPKKTITFGGTDYGLRTLATTVPVTMERARLHFDLYNRQFGDGQTPVSIPKEMSTLPKPMRITAGYLEEKTLCRSFRKKRERRKKNNPAVISAEKTLSKRSSASATTVEQVLESQAVKRNCRRELRAFYHSNRAEHEKRTQKLYTDRIYDQVAAQERKFIKAAATTQTDGRQKALPIMAIGTQGTGVGLRLKGHLKRGGKWLRKRHRRYVPVSMTNEHRSSQLCVYCFERVERAKARRRKSRQWKTVRVNGASQCVNPCCPAYQSGHATQNRDVQAAVAIGLASASNILSANRSTLTPFDPSIFSAGKPFVPGATNFWCVNSSRKLCEELREPGPVAMTGVIRTYASEEF

SEQ ID NO: 3664 - protein, 237 aa, Apophysomyces variabilis
MLDSLQQTHASGWQIAHYTKVTAAVTQRQSYGTIFTIPGVSEHQLSTITRARTDIVCTENEPKMLRKRGPKLTTGELNVKSVLERCLPRKHTTSMLTSNPTNSRIRGHARRRLKRLRGVQRRKGLVVIVDEYNTSKTCHWCLKPLQLQKYRGKDGKVRKCNGAVCCVNSNCVTVVNGCSTMNRDGNALKNIALKGVSMIVSSDGSPIPVFSSQYSSNYKLAQHFASQPTPVRLLHGP

SEQ ID NO: 3665 - protein, 1289 aa, Apophysomyces variabilis
MFRLSAMQVPHPQIRENKRKRKRVIQSNISLDKAIEALHDVFQNQLVTIISKELEDKPRKNTAKKARFQSEVEKQAKTNKILQELRTRLEKADRVPRTSLEQADDSINVTRGTIRRTLCFHYPEPASIGKLWRDYAAAHFNDAVAEARARLEEHGEVEEAGSSKEVTVNDDSKEEKEIIRTCSVRLSKILREDLDNQVKQTFLETIAITSEQATNYASELGTAVHATMLKYASGSVVLDAESKQAHYQQDGKTFNVLDVIHEEWIRHPEFLNSELAIAVAPMPDNIKNYVKALSKKHNDEFLNLFTEAHLQFLHSDYFGRQSYKAQGKSFWSSLQHQGLKDLPKPPAGLSTVMHFQLKQYATDLQNMWAGGLFHKSINHLLRILLRINLASEREKKIQEITEKKLQEKEKQREESSRTMRRKKEWRRRKIKGRLKQERKSLRRLEKRLGIEMDGNQRANLLQRKKSCVEAIRRLEKQAKEKYRPKKADNQPHQKDEEARGDMDKLAISADISVMDDEGIEETIETAIEEAQDELEEVEIKTLKKEPSRRRLIRIQAITKKLLLSTDIDGNVQASDVSDIWNDNDELQKVEIDIVVKLANALRPYVPKGRLSSAISLRLRFVLLSNAILHATGYSKFTANICPTISPASIHALPLDAASMYEMFGSNSAKFNLYKEDGSTIDNIREARTNKSAVIGSFFDQEKVKHICNTRGLEPRWRITITPHQMAVIDGDVKKGRVIDTSHYEERKKKSKGKRADSASSQFEDKSGLDIANITCSLEDAKQRVKALESAEKQIKNALRQREEVVESRMESYRRSKDVARRKVRDKRKSEKFDIYDSRAKQKQTDIYKDLKAAKLERAKSQSELSKIRSQLADQRRLRYIYQKQLDILKKQQTNKETKPKDDEQEQETKLCKVASWNRPGCEANTEFLDISELHQEVKQDPKKTITFGGTDYGLRTLATTVPVTMERARLHFDLYNRQFGDGQTPVSIPKEMSTLPKPMRITAGYLEEKTLCRSFRKKRERRKKNNPAVISAEKTLSKRSSASATTVEQVLESQAVKRNCRRELRAFYHSNRAEHEKRTQKLYTDRIYDQVAAQERKFIKAAATTQTDGRQKALPIMAIGTQGTGVGLRLKGHLKRGGKWLRKRHRRYVPVSMTNEHRSSQLCVYCFERVERAKARRRKSRQWKTVRVNGASQCVNPCCPAYQSGHATQNRDVQAAVAIGLASASNILSANRSTLTPFDPSIFSAGKPFVPGATNFWCVNSSRKLCEELREPGPVAMTGVIRTYASEEF

SEQ ID NO: 3666 - protein, 1726 aa, Apophysomyces variabilis
MFRLSAMQVPHPQIRENKRKRKRVIQSNISLDKAIEALHDVFQNQLVTIISKELEDKPRKNTAKKARFQSEVEKQAKTNKILQELRTRLEKADRVPRTSLEQADDSINVTRGTIRRTLCFHYPEPASIGKLWRDYAAAHFNDAVAEARARLEEHGEVEEAGSSKEVTVNDDSKEEKEIIRTCSVRLSKILREDLDNQVKQTFLETIAITSEQATNYASELGTAVHATMLKYASGSVVLDAESKQAHYQQDGKTFNVLDVIHEEWIRHPELLNSELAIAVAPMPDNIKNYVKALPKKHNDEFLNLFTEAHLQFLHSDYFGRQSYKAQGKSFWSSLQHQGLKDLPKPPAGLSTVMHFQLKQYATDLQNMWAGGLFHKSINHLLRILLRINLASEREKKIQEITEKKLQEKEKQREESSRTMRRKKEWRRRKIKGRLKQERKSLRRLEKRLGIEMDGNQRANLLQRKKSCVEAIRRLEKQAKEKYRPKKADNQPHQKDEEARGDMDKLAISADISVMDDEEIEETIETAIEEAQDELEEVEIKTLKKEPSRRRLIRIQAITKKLLLSTDIDGNVQASDVSDIWNDNDELQKVEIDIVVKLAKALRPYVPKGRLSSAISLRLRFVLLSNAILHATGYSKFTANICPTISPASIHALPLDAASMYEMFGSNSAKFNLYKEDGSTIDNIREARTNKSAVIGSFFDQEKVKHICNTRGLEPRWRITITPHQMAVIDGDVKKGRVIDTSHYEERKKKSKGKRADSASSQFEDKSGLDIANITCSLEDAKQRVKALESAEKQIKNALRQREEVVESRMESYRRSKDVARRKVRDKRKSEKFDIYDSRAKQKQTDIYKDLKAAKLERAKSQSELSKIRSQLADQRRLRYIYQKQLDILKKQQTNKETKPKNDEQEQETKLCKVASWNRPGCEANTEFLDISELHQEVKQDPKKTITFGGTDYGLRTLATTVPVTMERARLHFDLYNRQFGDGQTPVSIPKEMSTLPKPMRITAGYLEEKTLCRSFRKKRERRKKNNPAVISAEKTLSKRSSASATTVEQVLESQAVKRNCRRELRAFYHSNRAEHEKRTQKLYTDRIYDQVAAQERKFIKAAATTQTDGRQKALPIMAIGTQGTGVGLRLKGHLKRGGKWLRKRHRRYVPVSMTNEHRSSQLCVYCFERVERAKARRRKSRQWKTVRVNGASQCVNPCCPAYQSGHATQNRDVQAAVAIGLASASNILSANRSTLTPFDPSIFSAGKPFVPGATNFWCVNSSRKLCEELREPGPVAMTGVIRTYASGKRNRGLHIVSKKRKVRLEAIAHAIAEAHYDVVTLQEVWMWSDVDYIKNKTGHILPYAQHFYSGTLGSGLVILSRFPIVSSQYHRYTLAGRPLKIFHGDYYVGKGCGSACIDHPDIGLIDVFTTHLHAGYGNTDEYEAHRISESWEIARLVRSSACEGRQTGDFNSTPSSYNYRLLRDHAFMTDSWLEVNSSNSSTDELQRLGITCDSPRNTWSKRVLKQNAHDTELGDRLDYIFYRRTPQLTCIRSCVAMTDFVPNTLMSFSDHFAVHSTFAISPDGKAIGPFAPSLMQLRHPSFSALEPLILHNILELFQKDQLTTRKTAMRLLYGFVSCVLLVLGIYAAIVVVSSIPSLRINHPTALIVTIVCGVLMIVLAAIAPVCLIVGFVFGHAEHRALRQFIAELQLLLEGIQMQGKQLKTVQSAELISLVNRDDTTSLQRLN

SEQ ID NO: 3667 - protein, 651 aa, Apophysomyces variabilis
MPTDFSSSWREFRDKHPQMQQAPNTQLRSSDVLSEACVLLATCYSNNIVENFETRMRSFVEHKLSVAFPSMEKTDIQNIASEYAFERIAGGSPQWPNLIEPDLPLVAIVDKICDDLEALTPKPATQQAISASPGAYIPTLKYILSSYEEEHEIVAVSEKSSSDTTLPRLFSVSPKPSCKWRLVSINAKLLASLLSIREPTQPSEYPRVYFEALDLARFGFNKILSDGFAVNLVFARKQKERVPATEIDLEDFTIDEVEQWFEPWVVDPGLNQIYTAADGSGSQRHQLRRVSTKEYYAMTGSTRRAKQLEKQKDAAGITRIETGLESCKTASSVRGVLRPEFSSIDRPQESGIRPTQNKPHPSTKKWHPKAFQASKKIPLIVCGSAMFGTSGHASRKGKRAALVNTFDEVYTSQVCNSCLQRGLEKVTTSDSVSHHGVVVCKLYRTLWQRDINPAKNMFYITNSVCRGQSRPIEFCRPAKNDIPLRMWFPRNEDLDLYVSNGKFNNLNSHFSNDWSFHLAQPFLVHIIWLTQTISLNNANCYAINSIILVGASAPAGAVKRHDSQCKNHWFGSFRRKSFYSSLNVALCRVMQNQLFPWSLPYLCLKSNPPLAKFVLSLWSVVVVSMLFSCLYIHPAIELSRANMSGIDAVLK

SEQ ID NO: 3668 - protein, 366 aa, Apophysomyces variabilis
MPTGTNLAKQSVSLLQAIVDEEIEKSNQKLSKGRKRKRKSKDKDLTKITANDIKYAKMNIRGMTEDPSAGITFFGTDYGVITMSESVSFPIERFAYHLKLHNRFSALETQDDDTEDDFASDFQKIPKTFKITAKQIDDLSFTRRVGRQREYRKRATEEGKKIAKDNKDILRKFYSEKKSVKKSKRTQDIYTQKAYATIASNERNFLNGSGKKTNILLMMTGSAGTGVCSPIRGHYRRGGKKLRGQHLQQTSVGMTNEFRSSQLCPYGYQVLSHLHKKKDGDIKKNFGTVLCTNSECISVKKGYGSRGWDQNAALNIDLAGTSALFSKHHKPFSEFNPKKASKYLLDNNLLASLMFIPEGCGVGARA

SEQ ID NO: 3669 - protein, 678 aa, Apophysomyces variabilis
MIHNFRYKARYYTDNYHEHIDGQIVPYLTLALGKVNDNLLILCETCLCATFSLHCPQIHVLHVVPLNTEVPERRVGLRHTKSTEEILEDQLRKGFETFTPKAPLHSVVVEAHRDQLQRKVQELSQHTREVIAKTQLFVNQYILDHQVIPPICFTQNFFYRVTQLVLNKSMTTKNNKMPTDLSSSWREFRDKHPQMQQAPNTQLRSSNVLSEACVLLATCYSNNIVENFETRVRSFVEHKLSIAFPNMNKTEIQNIAWEYAFERIAGGSPQWPNLIEPDLPLPATEQAISASPGAYIPTLKYILSSYEEEHKVVAASEKSSSDTTLPRLFSISPKPSCKWRFVSINAKLLASLLSIREPTQPSEYPRVFFEALDLTRFGFNSLGDFTGNGNHPFACRILSDGFAVNLVFARKQKEKVPATEIDLEDFTINEVEQWFEPWAVDPGLNQIYTAADGSGSQRHQKDAAGITRIETGLESCKTASSEKHHQFVECFAQNFPVLTAFYGPGMAEKRFHNYQGVQHAREELVDVLVNGGKKPQESGIRSTQNKPHPSTKKWHPKAFQASKKIPLNAFGSAMFGASGHASRKGKRAALVNTFDEFYTSQVCNSCLQRGLEKVTTSDSVSHHGIVVCKHCRTLWQWDINSAKNMFYIANSVWRGQGRPIEFCRQAKNDIATTNVVSS

SEQ ID NO: 3670 - protein, 1193 aa, Apophysomyces variabilis
MDRLRQALEKADRIPRGSFEEADKKAGVPKGTIEKQIRSRLSSSHKTGEFWRQCAVDNFDDVLAVVKAEGKQNRPKKKGEDSDNLFRTCTVPLKSVLRPDLDENLKRIFMHTVESTSVQMTDYVSDLATVVRATMLKYVSVSLSLDPASGSVKAELDQTSTGFDIRTVVPKEKLRDESMLVDDYFVPVAPMPDNLSQFLDEMPGRRNNDLLSMFNENHIQFLHGLYFGTKGNVSKEKHYLWMQFHDQTLDNQPVIPDGLCRTSHFYMKQFSTNLKNMWAGSLYNRSMNHLLRVLLRVNLAPRREENVREIREKAKLAREKEIEQQQVIKYQYRKKAIKRKLKNEKKQLRNLKKQIEQEEEDDILVRLATRAATCAEAIERLENQLLARSESRSNPKSIKVEQMNNRASVTKEEEQQAKILISLGETHIGVFEQIEEELEEEEKEETSEPSRRKLGILQAITKALLQSDKISGHVTVEDVLATSHADDAFSPQEIDTVVNIANALRPYVIRGQIAPCIPLRLNFVVLANALLCSIGYQEFTASICPTISPASVHALPLDAVAMYEMFGSSYAQLDIYKADGSVFTNRDEAIAEKRTVIGSFFDVEAIEKTCKERGLVPRWRITVTPQKTAIIDGNVCEQRRPIESRYEARRKKYYRKKEPYGQEPSIEQQSTPELAKTLDDTKKDVKTLETLKCQHTKLVKEATKLVAGLRSSYQENQAICQKRIRDKRTADKNENVTEKEAAYQQQKLSYEALKAAKLNWSNQQMALNQVHDRLANARRKKYKLEQLVKAHQKKKGKSPAGRKERKSKGGEDEKMEEADGDEEDTKYKKEKEKKKDKHNDNNDEENEEEDEEEEEDSLCRPQSGRRPGCEDSVGRLDLGPLLEDQNNILTFSGTDYGLQVLSTTVPITRQRADFHLQLYNRYSMLGINNVNDHDDDIDVSPTNMLQLPKPIRITAKSLDEKTLARTFRKKRERRKKSNTEVLAAEEQLKEASMEKAMSVQDIIRCQKIGRSCRKTLRDFYHSNRWHKEKVIQDLYKERIYDRVAANERRKIAMEAGPHDSGRRVIPVMAIGTQGTCVGSRLKGHPKRGGKWLRARHRRRYKEIKWRTMNGSSRCVNSKCVTFKAGRTTQNRDVQAAVAIGLAAISNLFSAERITLPPFDPSHFDAGISNIADTTVQRCVQSSSESHHTGRCYC

SEQ ID NO: 3671 - protein, 515 aa, Apophysomyces variabilis
MSRRLTKLILGLSRKNAKAIAGDYIYELLARGDPHWPFEDELAVSDFDQAQYDPKNEEAEKAKGSFKDLTRLFSLSPSPSTDWRFICVNSKTLQQLTNISHRKDYEDQLAQFYQVFDFHKLGFDSLEQLQNFGNSGRIAFKNVIFTDGYAIDFQFARARKIESVVTDASLSVEDIDGNHIYDNFAPCAIDPGINQVFTASYGCGSEPHEIRRCSTKEYYVYTGSPNRQNKMEKEKKQQGIQDIETSLESGKTAHIEAYDGYLRSIFGNMDVLFQFYGPHRAEARFRGYQGVQTAREEMVNILAFGGKEYNCSRRKRTRSNRKSRKRKRKSRKKHVNKDSEVGNPLHQSLPQPNTSAERSTLKKTKRLPHWRQKKFTVERKVPLIVFGDGMFNNRCNYKGHRKGVVNILWRSLKRREKREELLVLTIDEYLSSQVCHSCRYRSLQKLTTADCVSHHSILVCKNCKMLWDRDVLASKNLFLIAESIWSGQGRPREFARPSLDQYIAVTNTVGPSGDF

SEQ ID NO: 3672 - protein, 535 aa, Apophysomyces variabilis
MASGLQTRVSWLHRRERAKRYWKEWEKDLVETYTEYFVPCTVHHIPPKLTATTKELASVYVPKTIANAKLHIVNNNESSGSATRAKKMAQCVCKKKPVEEMNWESLTLSHEKEAKALYKKHLEKYLSLPYLRQLEEQELPMDKDTEAKDEKDDQEVHEEIMTNQNDDDIFIPIDVLQQCIEFSSFLDRDAEALESKLRAFVLWGFLTDCHYKGKAVPQELIGRIRSRYGINHSRRSISKEAYDRNRREVEWREYIWESMFDLNILQPNQRKAKKGQQPRKTSKRDFNRLKKERDLSKQNRGIYHLRKNPTSIGDITIIRVVGIDPGIWDVASAVDSADGLHTHSLYPTRSTKISQLPRSGSMFTWCKQIQPKIRQKADMQAQVYDKLNEASPKTASVQGFQKYLKTLSKVNAKIHDFSCHYRHRENRILLFRARNITLDQLTNRNFSRRRIGFWPENAWTTITSYDASASTTTKRYYTEHLNVLIKGNLYWNRDINAGLNIRRILIECMMTNDLGSRPTGLKRPSKQQGLEEQGI

SEQ ID NO: 3673 - protein, 1103 aa, Apophysomyces variabilis
MDRLRQALEKADRIPRGSFEEADKKAGVPKGTIEKQIRSRLSSSHKTGEFWRQCAVDNFDDVLAVVKAEGKQNRPKKKDEDSDNLFRTCTVPLKSVLRPDLDENLKRIFMHTVESTSVQMTDYVSDLATVVRATMLKYVSVSLSLDPASGSVKAELDQTSTGFDIRTVVPKEKLRDESMLVDDYFVPVAPMPDNLSQFLDEMPGRRNNDLLSMFNENHIQFLHGLYFGTKGNVSKEKHYLWMQFHDQTLDNQPVIPDGLCRTSHFYMKQFSTNLKNMWAGSLYNRSMNHLLRVLLRVNLAPRREENVREIREKAKLAREKEIEQQQVIKYQYRKKAIKRKLKNEKKQLRNLKKQIEQEEEDDILVRLATRAATCAEAIERLENQLLARSESRSNPKSIKVEQMNNRASVTKEEEQQAKILISLGETHIGVFEQIEEELEEEEKEETSEPSRRKLGILQAITKALLQSDKISGHVTVEDVLATSHADDAFSPQEIDTVVNIANALRPYVIRGQIAPCIPLRLNFVVLANALLCSIGYQEFTASICPTISPASVHALPLDAVAMYEMFGSSYAQLDIYKADGSVFTNRDEAIAEKRTVIGSFFQRKKEPYVQEPSIEQQSTPELAKTLDDTKKDRIRDKRKADKHENVTEKEAAYQQQKLSYEALKAAKLNWSNQQMALNQVHDRLANARRKKYKLEQLVKAHQKKKGKSPAGRKERKSKGGEDEKMEEADGDEEDTKYKKEKEKKKDKHNDNNDEENEEEDEEEEEDSLCRPQSGRRPGCEDSVGRLDLGPLLEDQNNVLTFSGTDYGLQVLSTTVPITRQRADFHLQLYNRYSMLGVNNVNDHDDDIDVSPTNMLQLPKPIRITAKSLDEKTLARTFRKKRERRKKSNTEVLAAEEQLKEASMEKAMSVQDIIRCQKIGRSCRKTLRDFYHSNRWHKEKVIQDLYKERIYDRVAANERRKIAMEAGPHDSGRRVIPVMAIGTQGTCVGSRLKGHPKRGGKWLRARHRRRYKEIKWRTMNGSSRCVNSKCVTFKAGRTTQNRDVQAAVAIGLAAISNLFSAERITLPPFDPSHFDAGISNIADTTVQRCVQSSSESHHTGRCYC

SEQ ID NO: 3674 - protein, 701 aa, Apophysomyces variabilis
MYIIQGKRKDGVEKHQKKRAKIERNQANKNPNAAGPCASCNETGHLTSRSSRCRNHKTNIKEKVKQLLQSDSEMYTRVLPYESVVRQEHADRLRTRIVELSAFVLEVICRAQISRQNNHQYEPKLSRIDQAIVVGYRALYSEIVYQLRVFDGYSHALSAASLSIAEAYTSHIVDNFYGRISTYSLYKLQRLVPIVWDFIMEVVANGEPTWPVHAVDLVSVYIVDSVWDILDELQAVIPLPYKQAALPISPGRYIPLLRHILARYTELHQEAEAASILMTLASNNTTQHKQGISLPKLFLSAPLPSFQWRFVTVNSQALSTLASISLPRNNDHDSNLALFNQYFDLDRYGFNRIDSKQVFRNQIMTDGFSVHFQFSRSKPVRTTIDEAALDPGVRALFTAEYYALTESARRNNQLNKENQTAGIKEIESKFPTAKTCRSVQYSEYLQYFFLHREELFGFYHYGRGRGRFYNYQGRQRARDEIANILINGGKKYDRRRRKKTKRNRKERRRNRKKKKDKRVRERQERLAGNPERTKPSQKRSTNTNRRLPGWKKQKVKVDNDGKMTLIAFGNGMFNQRKTKFKGHPSGVVGKLWSSLKRRERQRQVLVVTVDEYLSSQICHCCHQRTLQKMKILDGVTHHDVLGCKDCGTLWDRDVNASKNLYEISLSVWSNGSRPAVFRRARDSQNDANIITSNVGSFSRRI

SEQ ID NO: 3675 - protein, 882 aa, Apophysomyces variabilis
MLQAVFEWCCSKLTALIPRSYEWNWQGIVCLCKIRKYFQQEAERLKREEVFCKDCGQNGHPNKRYKACPLNARHGKKPVGVKRKLNATEEAEFSAAKKRGRQLKAEETSNPNKSNKPCPSCGGIDHSKSSSKNCRKPSKTKKSVIAEKLNDNHYETFTRKLPTSSVVRQEFREIFQENSVRLSAFLREVIFRAQLLVNSYIIANCDRPVPSYIYTQNFWYSACQLIMGINISNNNPNFPQDLRDHWRAFLDNHPNALYPVRNFSGYSDALSAACVTLATTYSNNVAENFEGRLKFYISRRLTKLILGLSQKNAKAITGDYIYELLARGDPHWPFEDELAVSDFDQAVETICGEFATLMPEWQTNAEKLSAFPGSYIPVLAYILTEYNREHEEAKQKQNAQGEQYDPKNEEAEKAKGSFKDLPRLFSLSPSPSTHWRFICVNSKTLQQLTNISHRKDYEDQLAQFYQVFDFHKLGFDSLEQLQNFGNSGRIAFKNVIFTDGYAIDFQFARARKIESVVTDASLSVEDIDGNHIYDNFAPCAIDPGINQVFTASYGCGSEPHEIRRCSTKEYYVYTGSPNRQNKMEKEKKQQGIQDIETSLESGKTAHIEAYDGYLRSIFGNMDVLFQFYGPHRAEARFRGYQGVQRAREEMVNILAFGGKKYNCSRRKRTRSNRKSRKRKRKSRKKHVNKDSEVGNPLHQSLPQPNTSAERSTLKKTKRLPHWRQKKFTVERKVPLIVFGDGMFNNRCNYKGHRKGVVDILWRSLKRREKREELLVLTIDEYLSSQVCHSCRCRSLQKLTTADCVSHHSILVCKNCKMLWDRDVLGSKNFILDCEVNLVWARKTRRVCLALIRSIYRRYEYGWSLWGLLGFYGGHAGKFTITV

SEQ ID NO: 3676 - protein, 255 aa, Apophysomyces variabilis
MYRSLATDGYAAAFTFSRRRQHLIEDKKLAKTKDFQGDVHRFDLIGVDPGITDAYVASNGHEKYSHEIIIIIQERILPPRPLQRKQSNHGPYINEKPKIQQIEKDMPSAKTVSTSQFDRYARFLLLHMSTLHQYYDRRRIGRLQASDEFAERLISGSSKYPTKNTRNQRRHRKQKKKRGKRQNKTKAGTVKRTEISDTEPSENKWSKATPHPSKSKPLFAFGSAMINSTLKGTRAGNSNIRRKIKEMKPKDDARS

SEQ ID NO: 3677 - protein, 803 aa, Apophysomyces variabilis
MLQAVFEWCCSKLTALIPRSYEWNWQGIVCLCKIRKYFQQEAERLKREEVFCKDCGQNGHPNKRYKACPLNARHGKKPVGVKRKLNATEEAEFSAAKKRGRQLKAEETSNPNKSNKPCPSCGGIDHSKSSSKNCRKPSKTKKSVIAEKLNDNHYETFTRKLPTSSVVRQEFREIFQENSVRLSAFLREVIFRAQLLVNSYIIANCDRPVPSYIYTQNFWYSACQLIMGINISNNNPNFPQDLRDHWRAFLDNHPNALYPVRNFSGYSDALSAACVTLATTYSNNVAENFEGRLKFYISRRLTKLILGLSQENAKAIAGDYMYELLARGDPHWPFEDELAVSDFDQAVETICGEFATLMPEWQTNAEKLSAFPGSYIPVLAYILTEYNREHEEAKQKQNAQGEQYDPKNEEAEKAKGSFKDLPRLFSLSPSPSTHWRFICVNSKTLQQLTNISHRKDYEDQLAQFYQVFDFHKLGFDSLEQLQNFGNSGRIAFKNVIFTDGYAIDFQFARARKIESVVTDASLSVEDIDGNHIYDNFAPCAIDPGINQVFTASYGCGSEPHEIRRCSTKEYYVYTGSPNRQNKMEKEKKQQGIQDIETSLESGKTAHIEAYDGYLRSIFGNMDVLFQFYGPHRAEARFRGYQGVQRAREEMVNILAFGGKKYNCSRRKRTRSNRKSRKRKRKSRKKHVNKDSEVGNPLHQSLPQPNTSAERSTLKKTKRLPHWRQKKFTVERKVPLIVFGDGMFNNRCNYKGHRKGVVNILWRSLKRREKREELLVLTIDEYLSSQLQMQVPTKAYYSRLRFSP

SEQ ID NO: 3678 - protein, 1112 aa, Apophysomyces variabilis
MLPNLNFVGNSGLSIGDAISRSPTKNYEQYMQTVIAGARGRPISKENRKAALSVAVVRCLGDKQHAVSLRLCYNQTIPANGLLRLIAIVKMCNIRVYLFSTQSKPKVIGNNQSDYNMSLLHEVDSHTGTSRWVPLYIARFTSPKLPDPETTIEKSPFISPAATMKNVVGEPGKKKQRAPLGVTEEVIKDELRKEINKRIHLEFSRITRNKEKFMNRNKTPKAASIKDSKRKSSHIHGDDSEGDNRRGDEPSEDKEQSDDEDDNHQEYIRVATTTLRKLVRPDIDLDTVLRGDVYKFIGYDNYSTQINLADAFPADYDFGDHKAKHSIVSLPFINADAAVDANIFSFAQFQNMFYSTVGGIYTEQIPKPWFSINGVLSSLVDPNDDAVASQFQAHSLRALYTAANNLYSGSLYPRSLTNVIRLLLRINLAPRRMSKYMQLVKKKAEEKKDRQEQRKDLRSNVQRRRNRSYWTKELKKAYMNGRPDNVVEAIQRKIADNLPRKDRTEDQKKLNEEEIKTEDDLVNDSEDDEDTATTTSSQAAITSKETSARTIRPLVAIVRMLVESPPPDQTYYKCKRRRGRCSYGYYIDHSRATNGCQSCQLPEPYTPRRNEPDEPPAKHILTVLPIAALSNVVSTILGMQDRVNKLTIETSNKWALPVKADGIYKIMIDAFDIRTNRQGEFITSGLQARTEKETVFKAFFQTDKTHCMMNRRHLFFCWRPVFVNEWTVRVVETINRNKPHQLQERIDRTQASILSLEQQLKLIQKEIGALEKERINHSTSAHGRTNSTAYRKLKQTRQQIRSKQNTAIVLQEKLEQARRDRYVLNKAMREVSKKGKGKEKSSASTGRSRKRKRKKQKRNSQATSYAKAKITEGYMPQMLSLVKPLFEKNSIPVCGVDPGIRITGVSTRAEAEDRRIEREKRTREVFTQKAYYKYADVERMHFPQDMISEKAVHFYGHWQPTNSHIRGHARRGLKRLRGVQRRKGLVVIVNEYNTSKTCHWCLMPLQLQKYRGKDRKVRKCNGAVCCVNPNCVTIVNGCSTMNRDGKASKNIALKGVSMLSQVMEVQSRCSALNTQAITSLHNNLLVNQPRFDFCMAREGQLPSKYKHCSIGE

SEQ ID NO: 3679 - protein, 1193 aa, Apophysomyces variabilis
MDRLRQALEKADRIPRGSFEEADKKAGVPKGTIEKQIRSRLSSSHKTGEFWRQCAVDNFDDVLAVVKAEGKQNRPKKKDEDSDNLFRTCTVPLKSVLRPDLDENLKRIFMHTVESTSVQMTDYVSDLATVVRATMLKYVSVSLSLDPASGSVKAELDQTSTGFDIRTVVPKEKLRDESMLVDDYFVPVAPMPDNLSQFLDEMPGRRNNDLLSMFNENHIQFLHGLYFGTKGNVSKEKHYLWMQFHDQTLDNQPVIPDGLCRTSHFYMKQFSTNLKNMWAGSLYNRSMNHLLRVLLRVNLAPRREEKVREIREKAKLAREKEIEQQQVIKYQYRKKAIKRKLKNEKKQLRNLKKQIEQEEEDDILVRLATRAATCAEAIERLENQLLARSESRSNPKSIKVEQMNNRASVTKEEEQQAKILISLGETHIGVFEQIEEELEEEEKEETSEPSRRKLGILQAITKALLQSDKISGHVTVEDVLATSHADDAFSPQEIDTVVNIANALRPYVIRGQIAPCIPLRLNFVVLANALLCSIGYQEFTASICPTISPASVHALPLDAVAMYEMFGSSYAQLDIYKADGSVFTNRDEAIAEKRTVIGSFFNVEAIEKTCKERGLVPRWRITVTPQKTAIIDGNVCEQRRPIESRYEARRKKYYRKKEPYVQEPSIEQQSTPELAKTLDDTKKDVKTLETLKGQHTKLVKEATKLVAGLRSSYQENQAICQKRIRDKRKADKHENVTEKEAAYQQQKLSYEALKAAKLNWSNQQMALNQVHDRLANARRKKYKLEQLVKAHQKKKGKSPAGRKERKSKGGEDEKMEEADGDEEDTKYKKEKEKKKDKHNDNNDEENEEEDEEEEEDSLCRPQSGRRPGCEDSVGRLDLGPLLEDQNNVLTFSGTDYGLQVLSTTVPITRQRADFHLQLYNRYSMLGVNNVNDHDDDIDVSPTNMLQLPKPIRITAKSLDEKTLARTFRKKRERRKKSNTEVLAAEEQLKEASMEKAMSVQDIIRCQKIGRSCRKTLRDFYHSNRWHKEKVIQDLYKERIYDRVAANERRKIAMEAGPHDSGRRVIPVMAIGTQGTCVGSRLKGHPKRGGKWLRARHRRRYKEIKWRTMNGSSRCVNSKCVTFKAGRTTQNRDVQAAVAIGLAAISNLFSAERITLPPFDPSHFDAGISNIADTTVQRCVQSSSESHHTGRCYC

SEQ ID NO: 3680 - protein, 1390 aa, Apophysomyces variabilis
MNELNAFADNSDVPKICLVFDGDRLSTKRATHAARQAKKNLAWRKARRQTGDSRGLYFAARERLRRKYAKQWASFTPAIKDAIIHELNTRQDTRPYGRNFANEPVRIFIHEALFEADLEVVYLCDSLGEGVQSAIMSRDGDLFAYQGALDVPRITKMNWRHGPQRYNGTVSTKRDLVTAFMGLQTAITDGQAINAQIRFVVLAATCGNDYAKNLRGKSFKRVKAALEQVPQADEADTLLQTLMNNIVHSDEQPIHYGDIRLQNADTNIIESLARSAVAGTTPARHNQRPDYGSRYRLLEPTPELNEGVIEEENTGPHAPKSSKKQTRPAKKGRAGPSRRQAQFIRDAASGEIRDSFPEKITYTEEDTGHHITLYQSSRYVATADAGLYSSVLAAAVHRARRNRPDREGIDEASLIEKVMDKIIDDMSYVRYVGYHIANIAIREAYNLDNDAMLSLYELFFRNGKRTAQDLWRHIFYCATNYQTMGRSEPSLATHQAASEAQYIPQSDILHSDGQLRGHNDDGTNLFKAFTADTAFFYLSRMLKRPLERNVLLKARKLWYQDCSAEMCIAPTPMYMGEMVTEIANGASVDFRKNIVYNFKDCYCDYLRSRLKEVARVPVGWPAPDQGRFDEFIQDIIHSVHDGIQHVAAQERQPRFQYIAEANIHEQDNKFVTNMVNRYKNSIEAFDEDRWRRKVENHATVPPGWPRNRDKLITALFQRIWGMSVDISEAGADQEGFEEYEQDQEEERQATGDIFAGLANDVHTQIEDFITAERNLQVKGIRVSEVNLSECLGENGRQGTNGGNNDEENGYEDDEDDVLHRTYGGKLSRAKAARLIPIMIYFLERREGNSQSFVLCPLQAHHRIAISFNLSFTTTLLARIEHFSRPIIQQLEQKLTASPNDRRIAELARERDNLQNACVRLQGIKSRDPFSALFDIRRQATITRDGGVDVRDRGYMRWLNQRIPGNENKLRFSRRRVFRTDGVRLYCIYNDWLRSRRGNTTCKYLTEIRRTTRETLKDAWQAGSSGDQYDYLQHYDGVVGLDFGELTIKRGYLYGRTIPNRDWLEARKATNNIDNIEAALSEGSPRSTYDRYREIWDNAISQRSCLDKACYLITNQAKRTFDMNHEMDDNRRHVDEPRLVYAFGLDGMSRKSRRRGLAPMYHKIANALYRKINQKNRNKDRQHADVSTRVDEYLTSKVCCRCSKEGQDRRIDFLRRPPTATVQDRARLENGQEKVLRVVQCANCDRTFHGDGNAADNHATIARYMLRFQQRPRWFIRPSRRLEAAGEEEAMVMTGHAGLQHRASGEEVTEVPEIAEPRRHPSEGMAVTTPLEERASGREVAWAREVPGIAEPRRRPSQEAAVTTPTARRRTRASQTETMVEPPRSRRRISR

SEQ ID NO: 3681 - protein, 534 aa, Apophysomyces variabilis
MQFVGYSHALSAACLSVAEAYTSHIVDNFYGRISTYSLYKLQRLVPALSRSHARQIVWDFIMEVVANGEPTWPVRAVDLVSVYIVHSVWDILDELQAVIPLPYEQATLATSPGRYIPLLRHILARYTELHQEAEAASILMTLASNNTTQHKQGISLPKLFSLAPLPSFQWRFVTVNSQALSTLASISLPRTNDYDSNLALFNQCFDLDRYGFNSAKPVRTTMDEGIQLEDLNIEEVQEYFRPAALDPGVRALLTASYGYSEESHEIRRCSTADYYALTGSARRNNQLNKGKQTAGSKEIESKFPTAKSCSSVQYSEYLQYFFLHREELFGFYHSGRGRGRFYNYQGRQPARGEIANILINGGKKYDRRRRKKTKRNRKERRRNRKKKNKRAHERQERLAGSPERTEPSHESNIRRPESSIRSTNTNRRLPRWKKQKVKVDNDGKMALIAFGNVMFNQRKTKFKGHPSGVVEKLWSSLKKTGAATAGSSCQCRRIHIFIDLSLLPSAIFTEDEDFGRRYLPWCSWVQELWHTVGS

SEQ ID NO: 3682 - protein, 218 aa, Apophysomyces variabilis
MTRHQISKRYQRPSKSLGNKLVTFPLQDTSEDKGSIGKGRAKKERKVKAIEKKLSKNNVGNAVDIDSLHNYRKIAVDNRDTLRKFYSEKKSVKKSKHTQDVYTQKAYATVALNERNFLNGSGKKTDILLMMTGSVGTAVRSPIRGHYRRGGKKLREQHLQQTSVGTTNEFRSSQLYRYCYQVLSHPIQPKEASKYLLDDNLLASLTSILEGCGVGARA

SEQ ID NO: 3683 - protein, 271 aa, Apophysomyces variabilis
MFVSPEQLQNFGNSGGIAFKNVIFTYGYAIDFQFARARKTESVVTDVSLSVEDIDGSHIYDNFAPCAIDLGINQVFTASYGCGSEPHEIRRCSTKEYYVYTDIETSLESGKTAHIEAYYGYLRSIFGNMDVLFQFYGPHRAEARFRGYQGVQRAREEMVNILAFGGKNLPQPNTSAELSTLNKIKRLPHWRQKKFTVERNVPLIEFGDGTFNNRCNYKAHRKGVMNILWRSLKRREKREELLVLTIDEYLSSQLQMQVPAQAYHSRLRFSP

SEQ ID NO: 3684 - protein, 495 aa, Apophysomyces variabilis
MPDNIYDFWNQFRERHPAIVFPRNNFTGYSDALSAACKTLRDTSTNDIVENFQQRFCGFIIHRLQMLVPDLSKSSASRITYDYLYESIAGGEPAWPSCLENASFDLFLAIVNLRDFLIPLMPQMCTLEALSERLGVCISVLRVISDMYEQEHQQNDDEESGNLPRLFSLAPQPSFHFRFVTINAKALKALVQVRNDTDAYEGNLEIFNQVFDLNKYGFRRSVTYYLRIIVVFHFARSAKLNTVELELEDFTTEDINRYYRVCGIDPGVRHLYTASYGAGETEHEIRRCSSAEYYCMIGSPQRGQQLLKHKRHQGIDSIENGARKYKYRKRKHRGANRKKRKKNREQQRRRHKKKNTGRIPEQPLSAVRSTVNESRRARSWKQSQPNPDNNRKMPLILKRREARGEVLVVKIDEYLTSQICHKCKTKSLCNMVTADGIKHHGIQDCKTCRMRWNRDINASKNIFYIAQSIWNVHGRPDAFRRPTQITATNAGSERV

SEQ ID NO: 3685 - protein, 1155 aa, Apophysomyces variabilis
MDRLRQALEKADRIPRGSFEEADKKAGVPKGTIEKQIRSRLSSSHKTGEFWRQCAVDNFDDVLAVVKAEGKQNRPKKKDEDSDNLFRTCTVPLKSVLRPDLDENLKRIFMHTVESTSVQMTDYVSDLATVVRATMLKYVSVSLSLDPASGSVKAELDQTSTGFDIRTVVPKEKLRDESMLVDDYFVPVAPMPDNLSQFLDEMPGRRNNDLLSMFNENHIQFLHGLYFGTKGNVSKEKHYLWMQFHDQTLDNQPVIPDGLCRTSHFYMKQFSTNLKNMWAGSLYNRSMNHLLRVLLRVNLAPRREEKVREIREKAKLAREKEIEQQQVIKYQYRKKAIKRKLKNEKKQLRNLKKQIEQEEEDDILVRLATRAATCAEAIERLENQLLARSESRSNPKSIKVEQMNNRASVTKEEEQQAKILISLGETHIGVFEQIEEELEEEEKEETSEPSRRKLGILQAITKALLQSDKISGHVTVEDVLATSHADDAFSPQEIDTVVNIANALRPYVIRGQIAPCIPLRLNFVVLANALLCSIGYQEFTASICPTISPASVHALPLDAVAMYEMFGSSYAQLDIYKADGSVFTNRDEAIAEKRTVIGSFFNVEAIEKTCKERGLVPRWRITVTPQKTAIIDGNVCEQRRPIESRYEARRKKYYRKKEPYVQEPSIEQQSTPELAKTLDDTKKDRIRDKRKADKHENVTEKEAAYQQQKLSYEALKAAKLNWSNQQMALNQVHDRLANARRKKYKLEQLVKAHQKKKGKSPAGRKERKSKGGEDEKMEEADGDEEDTKYKKEKEKKKDKHNDNNDEENEEEDEEEEEDSLCRPQSGRRPGCEDSVGRLDLGPLLEDQNNILTFSGTDYGLQVLSTTVPITRQRADFHLQLYNRYSMLGVNNVNDHDDDIDVSPTDMLQLPKPIRITAKSLDEKTLARTFRKKRERRKKSNTEVLAAEEQLKEASMEKAMSVQDIIRCQKIGRSCRKTLRDFYHSNRWHKEKVIQDLYKERIYDRVAANERRKIAMEAGPHDSGRRVIPVMAIGTQGTCVGSRLKGHPKRGGKWLRARHRRRYKEIKWRTMNGSSRCVNSKCVTFKAGRTTQNRDVQAAVAIGLAAISNLFSAERITLPPFDPSHFDAGISNIADTTVQRCVQSSSESHHTGRCYC

SEQ ID NO: 3686 - protein, 622 aa, Apophysomyces variabilis
MTGSPQRGQQLLKQKRHQGIDTIESNFPSAKTCDIREYNGRVDYFFLHKDVLFNFYGPNDRERRFRDHLGRQRAIVELANILIDGGRKYNHRKRNQRGANRKKRKKNREQRRRHKKKNTGRIPEQPLSAVRSTVNESRRARSWKQSQPNPDNNGKMPLSVFGAGMILKRRKARGEVLVVNIDEHLTSQVCHKCKSKTLCDVVTEDGIKHHGMQDCKTCRMRWNRDINASKNMFYIAQSIWNGHGPPDAFRRPATNAGPERVVTSTPSSPVNMNFFQPRSANTSAPNKKLQEIEASRPWIEKYRPKSMDEIASQEQAVVVLKHALQSENLPHLLFYGPPGTGKTSTILALARELYGPSLVKTRVLELNASDDRGIQVVREKVKNFSRTTANQKVSGYPCPPYKIVVLDEADSMTKDAQSALRRTMETYSKTTRFCIICNYVSRIIDPITSRCAKFRFKSLPVEDLRARIDMICKEENVKLAPGAMEALFAACNGDLRRAIMILQIASNIPQGECITADVINETAGSVPESVTMTIVDAWKSNNHKQIENAVEAIMLQGYSAEFVLNQLHEYIVRSDDLNTLQKSQISEIMGETDFTLVSGADQHLQLLSLVLKIASIANNQAL

SEQ ID NO: 3687 - protein, 317 aa, Apophysomyces variabilis
MLVSLEQLQNFGNSGRIAFKNVIFTDGYAIDFQFARALKTESVVTDVSLSVEDIDGSHIYDNFVPCAIDPGINQVFAASYGCGSEPHEIRRYSTKEYYVYTGSPNRQNKMEKEKEQQGIQNIETSLESGKTAHIETYNGYLRSIFGNMDVLFQFYGPHRAEARFREYEGVQTAREEMVNILAFGGKEYNCSRRKRTRSNRKARKRKRKNRKKQVNKDSEVGNPLHQSLPQPNTSAERSTLNKTKRLPHWRQKKFTVERKVTLIVFGDGMFNNRCNYKGHRKGVVNILWRFLKRREKREELLVLTIDEYLSSQLSWSD

SEQ ID NO: 3688 - protein, 680 aa, Apophysomyces variabilis
MIELRRYRSSKNCRKSSKTKKRVIGEKLNDNHYETFTRKLPASSVLRPEFREFFQENGVGLSAFLREVIFRAQLFVNSYIIANCERPVPSYNYTQNFWNFSGYSDAVSAACVTLATTYSNNAAENFESRLKFYISRRLTKLILLIPKKKAKAIAGGYIYELVARGDHHWPFEEELAVSDFDRAVETICGEFATLMPEWQTNAEKLSASPGSYIPVLAYILTKYNQDHEQAKQKQNAPKNQESEKAKDSFKDLLRLFSLSPSFSTHWRFICVDSKTLQQLTNISHRKDYEDQLAQFYQVFDFHKLGFDSLEQLQNFGSSGRIAFKTITFSDGYAIDFQFARALKTESVVTDVSLSVEDIDGSHIYDNFVPCAIDPGINQVFAASYGCGSEPHEIRRYSTKEYYVYTGSPNRQNKMEKEKEQQGIQNIETSLESGKTAHIETYNGYLRSIFGNMDVLFQFYGPHRAEARFREYEGVQTAREEMVNILAFGGKEYNCSRRKRTRSNRKARKRKRKNRKKQVNKDSEVGNPLHQSLPQPNTSAERSTLNKTKRLPHWRQKKFTVERKVSLIGVMNILWRSLKRREKREELLVLTIDEYLSSQACHSCRCRSLEKLTTADCVSHYSILVCKNCKMLWDRDVLASKNLFWIAESIWSGQGRLREFARPSLDQYTAVTNTVGPTEDF

SEQ ID NO: 3689 - protein, 572 aa, Apophysomyces variabilis
MSDNAYFPNQKEIPPITHQLCYTLFALIAGEAHHADESLENAFATFQETLGNFPESKFKSKGFMTVVSSAAKEYEEAIRNHVCANFKKTVKDRTTMAEYMYNKLCDIDCQWPTSIDKNQGIIDISESLMKLGFEQKIAITEGKPQNHVSTAYVRRMMEELRLPKRFKPLPEAEMTSLESFTKETINAIESNTFAPEKYADPKGTWKFTMLPVYSFQMRHVTVDNQALARLLFQAGRRDNQTPVNPSETRREYYHLFDMAKIGYPTYESLETKRTIFWDVIRTYGVVVEFVFKKYKEPFDPKKKPLTPANLRGKYDNAVIWGVDQEFQATTTEYYSICGYNRANQRRKQYMDAEPEAKKLIDDIPSLKTSELRKLTDSVKYVMQHYEMITEFYSRDLRYNKLKFKSYIGRQKGRAEIAKSLLCDSKKYNMGSSQNRKKPNEKKWVAHCPNEKQDERNGPIIIAYSNGTFSGSMHGWVAAPTKAIVEELKRQAFRRKKYAHVARKKASKNKERPDANGQEGAGIYAVLVCQKESYTAMYWNRDHMAAMNIREVFLYMMSNKDERPSEFRRRAST

SEQ ID NO: 3690 - protein, 202 aa, Apophysomyces variabilis
MLSHDQLYVALSRVTEASNLRKSYIQRQKGRSEVAKILLYGSKKYDQSSKQKEPKRGDSKWVPLSPNDRSDEKSKPIIVAYGNGGFSGSMKGKKAAPTKAVFKELQQQARRRKDEYLTSQICPACHTRDLQKANEENDAQGHKGWTIHAVLTCQKKSCTMMFWNRDTMAATNILDVFLYMRDHNNERPGAFRRPKTTQSIQL

SEQ ID NO: 3691 - protein, 946 aa, Apophysomyces variabilis
MWAGSLYNRSMNHLLRVLLRVNLAPRREEKVREIREKAKLAREKEIKQQQVIKYQYRKKAIKRKLKNEKKQLRNLKKQIEQEEEDDILVRLATRAATCVEAIERLENQLLARSESRSNPESIKVEQMNNRASVTKEEEQQAKILISLGETHIGVFEQIEEELEDEEKEETSEPSRRKLGILQAITKALLQSDKISGHVTVEDVLATSHADDAFSPQEIDTVVNIANALRPYVIRGEIAPCIPLRLNFVVLANALLCSIEYQEFTASICPTISPASVHALPLDAVAMYEMFGSSYAQLDIYKADGSVFTNRDEAIAEKRTVIGSFFNVEAIEKTCKERGLEAAYQQQKLSYEALKAAKLNWSNQQMALNQVHDRLANARRKKYKLEQNRTVGESASKEKSGRRPGCEDSVGRLDLGPLLEDQNNILTFSGTDYGLQVLSTTVPITRQRADFHLQLYNRYSMLGVNNVNDHDDDIDVSPTDMLQLPKPIRITAKSLDETTFARTFRKKRERRKKSNAEILAAEEQLKEASMEKAMSVQDIIRCQEIGRGCRKTLRDFYHSNRWHKEKVIQDLYKERIYDRVAANERRKIAMEAGPHDSGRRVIPVMAIGAQGTCVGSRLKGHPKRGGKWLRARHRRYTPVAMTDEHRSSQTYVFCFQKIIHPKGRRYKETKWRTMNGSSRCVNSKCVTFKAGRTTQNRDVQAAVAIGLAAISNLFSAERITLPPFDPSHFDAGISNIADTTVQGCVQSSSESHHPGCTDVHIPSIVETMTNGSKKSNDRSQPPVSAVRREPASIAGNNVFPDLLFPPKRVGYFVLRHHRLTRKKNGICSHGSFFLVQIYSQHSEFDEVVNFVFLEIFSITRTPDAVCTNFFHVFLKRWLPCKLLQAVEFGSRGFLNCHHECSVSSSSVARLSLLLSMLHSASSRRSTTSSVGKPTFSSSTTVTLLCTV

SEQ ID NO: 3692 - protein, 612 aa, Apophysomyces variabilis
MRSRSCRSSSLCPSHVTSKSEDAKEALWEIALGTISHSEGLGESPLHVLFCCAEFSPMKYGLALTREIELLFSRFVLWRLSNSKPIPHLCFQQDFFYACGQMILGRNITSRQILQQLEFLTDLHTVYKGYERLRTGQDDKPLVGISGDIMHCFASTCAQMAVAASNHVVENYSQRMEKYIKYCLQIELARKALDITTEDIKKLAKFPYDIGAKEQPHYPYSIVPRAEFKTATNTVLQNVNICPENVPVTSTELAAKPRVYVRPLYEILEDLEPLGDTPVRKPMPILFRGWLFRKFSEKLESFKNLSRRKKIILGVDPGITDAYVASNGHEEYSHETISSSLKVCYHLGPLQRKQSNHGTYENEKPKIQQIEKDMPSAKTASISQFDRYARFLLLHMSILHQYYDRRRIGRQQASDEFAECLISGGSKYPTKNTRNQRRHRKQKKKRRIRQNKIKAGTVKRTETSDTEPSENKWSKATPDSMKRKPLFAFGSAMFNSTLKGTGAGISNIIRRKIKENEARGRCKVVDVDEFKTSKICSGCGAEKLRNVKGSLGQSLHVVVHCEQCKTVWNRDCNASRDIRRIAEHMALNNNNRPSPFQRKNQLPGQTPSKTCK

SEQ ID NO: 3693 - protein, 618 aa, Apophysomyces variabilis
MSNERSHKLVLSGRASQKFQSVALKKAKKTGRASKQASSSNTTFIANPCPTCGATEHRSTRAKSCPRHTKSTEEILEDQLGKGFETFTRKAPLHFVVVEAHRDQLQRKVQELSQYTGEVIARTQLFVNQYILDHQVILPICFTQNFFYSVTQPVLNKSMTTKNDKMPTDLSNSWREFRDKHPQMQQAPNTQLRSSDVLSEGCVLLATCYSNNIVENFETRVRSFVEHNLSVAFLSVNKTEIQNIAWEYAFERIAGGSPQWHNLIEADLSLVAIVDKICDDLEALTPKPATQQAISASPGAYIPTLKYIMSSYEEEHEIVAASEKVLVIQLCFVCSRFHQNQVARNLAFARKQKEKVPATEIDLEDFTIDEVEQWFEPWAVDPGLNQIYKAADGSGSQRHQKDSAGITRIETGLESCKTASSEKHHQFVECFAQNFPVLTAFYGPGMAEKHFHNYQGVQRAREELVNVLVNGGKKYCKQRRRKTRKNSRKRKRKTLKRREQEKLKWRSGSETKSMFAASGHASRKGKRAALVNTFDKFYTSQVCNSCLQRGLEKVTTSDSVSHHGVVVCKHCRTLWQWDINSAKNMFYIANSVWRGQGRPIEFCRPAKNDIATTNVVSS

SEQ ID NO: 3694 - protein, 344 aa, Apophysomyces variabilis
MTENRSDDTSLPQLFSISPKPSAPWRFVSINAELMVSLASLRRPQQPSEYCTVFFQVLDLSRLDLTGTYSIEFNPTMLNAIILLYVPSLDDFTQNVNHRFACRILTDGFAVNLLFARRAREGTLDTELELEDFSLDEVNRYFEPWAVDPGHNQVFIAVDGSGSKSHQVRRVSNKEYYAMTGSERRAKTLQKDKDTHGITTIETNMITCKTALSQRHHEFVACFLKKFPSLARFYGPCMAKIRFRNYQGTQRAPEELMNLILHMVSASYVMFGFMERYIQVCHACMRKDLTKVITADGVSHHGISVCKNCHILWQRDVNSAKSMYHIADSVWRGLGRPEEFRRPQ

SEQ ID NO: 3695 - protein, 826 aa, Apophysomyces variabilis
MNHEMDDNRRHVDEPRLVYAFGLDGMSRKSRRGGLAPMDHKIANALYREINQKNRNKDRQHVDVCTRVDEYLTSKVYCRCSKECQDRRIDFLRRPPTATVQDRARLENGQEKVSRYVATADAGLYSSVLAAAVHRARRRNRPDREGIDEASLIQKVMDKIIDDMSYVRYVGYHVANIAIREAYNLDNDAMLSFYELLFRNGKRTAQDLWRHIFYCATNYQTMGRSEPSLATRQAASEAQYIPQSDILHSDGQLCGYNDDGTNLFKAFTADTAFFYLSRMLTTPLDASVDFRKNIVYNFKDRYCDYLRSRLKQVARVPVAAQERQPRFQYVAEANIREQVNKFVTNMVNRYKNSIEAFDEDRDKIISALFQRIWGMSVDISEAGADQEDFEEYEQDQEEERQATGDILAGLANDVHTQIEDFITAERNLQVTGIRVSEVNLSECLGENGRQGTNGGNNDEENGYEDDEDDVLHRTYGGKVSRAKAARLIPFMIYFLERREARRTFDMNHEMDDNRRHVDEPRLVYAFGLDGMSRKSRRGGLAPMDHKIANALYREINQKNRNKDRQHVDVCTRVDEYLTSKVYCRCSKECQDRRIDFLRRPPTATVQDRARLENGQEKVLRVVQCANCDRTFHRDGNAADNQATIARYMLRFQQRPRWFIHPSRRLEAAGEEEAMVMTGRAGLQQRASGGEVTEVPEIAEPRRHPSEGMAVATPPREMAVITPSTETEMAVTTPLEERASGREVAGAREVPGIAEPRRSPSQEAAVIIPTARRRTRASQTETMVEPPRSRRRISRGEEERAESSRAPLRRSERQQAKRQKRIHESYG

SEQ ID NO: 3696 - protein, 421 aa, Apophysomyces variabilis
MHSVIHYLLLPSPRQVLHRFKSSAVRYTRTGHSQMPCLSLAGPTDTGAGPASAFGQDYPSGNKGRIESFDTVKVLQEKLKQARRDRYVLNKAMREVSKKGKGKEKSSASTSRSRKRKRKRQKRSSQAASSAKPKITEGYMPLMLSLVKPLFEKNSIPVCGVDPGIRTTGVSTSTTSAWMTQRIRNFTSNTTTELRHDIYNTWSLRASAVNHHSRSSRHRLRRERAKNAEKEGTEAENRRIEREKRTREVFTQKAYHKYADIERMHFPPRHDFSKAVHFYGHWQPTNSHIRGHARRGLKRLRGVQRRKGFLVIVNEYNTSKTCHWCLKPLQLQKYRGKDGKVRKCNGAVCCVNPNCVTVVNGCSTMNRDGNASKNIALKGVSMIVSSDGSPIPVFSSQYSSNYKLAQQLASQPTPVRLLHGP

SEQ ID NO: 3697 - protein, 702 aa, Apophysomyces variabilis
MDSLLLLSAILVSLGLPPYPPILYTLIKKLHVEIAVPLGIRQREVANAPCQKHMGREKPLMTTLRLRDKRSAEESTRSVQCENHVPTIKEKVQETFASGSETYTRVVAFDSFVRAEHRDQLHRKIIELCSFVREVVCRAQIFVNGYVINTAETEIPVCIFSQNFWYSVCQLVLGKAIWNKNTKFPPSVRIHWDTFSQQHPDIVYPLRGFVGYSDALAAACTTLQIAYTNHIVENFNNHIAAYCIHRFEQLLPELTKAQIKAICWDYVVEVIVDGEPHRPTTLVSTVYIRAVNAAKTVLDELSHRIHSPCRPADLSASPGSYILVLRFILQSFTLAHREAEAASALIGLAGIQDDDQQSITPPRLFSLVPTSFILLSARRPSNNYESTDKYEANFNLFNQCFDLEKYGFGRRDNQQLYRNQIVTDGFSVHFQFSRAKSTQSHSEEQIRLQDLTTDEVAQFYRPVAVDPGIGHLYTASYSHGADQHEIRNVPLRNIMLSLDIKDFESKFPTDKTTENDQYAKYVNYFFMHRDAIFRFYHSGRGHSRFQNYQGRQRAREEGVNILVHGGKKTAESAVRSTTSNRRLPRWKKTKVKFDNDGKIPLVVFGSRMFGKDEYLSSQICNSCHSRTLTKLKTLDGVTHHSVLDRKTCGTLWNRDVNAAKNLFEIAVSVWSTGNRPAVFSRSVPDETRTNITAANAGFPTGI

SEQ ID NO: 3698 - protein, 471 aa, Apophysomyces variabilis
MPTDLSGSWREFRDKHPQMQQAPNTQAFERIAGGSPQWPNLIEPDLSLVAIVDKICDDLEALTPKPATQQAISASPGAYIPTLKYILSSYEEEHKIVAASEKSSSETTLPRLFSISPKPSYKWRFISINAKLLASLLSIREPTQPSEYPRVFFEALDLTRFAFNKILSDGFAVNLVFARKQKERLLATEIDLEDFTVDEVEQWFEPWAVDPGLNQIYTAADGSGSQRHQLRRVSTKEYYAMTGCTRRAKQLEKQKDAAGITRIETGLESCKTASSEQHHQLVECFAQNFPVLTAFYGPGMAEKRFHNYQGVQRAREELVNVLVNGGKKPQESGIRSTQNKPHPSTKKWHPKAFQASKKISLIVFGSAMFGASGHASRKGKRAALVNTCWKMLKRRERRGELIATTIDEFYTSQVCNSCLQRGLENVTTSDSVSHHGVVVCKHCRTLWQRDINSEKTCSTLQTRFGADKVAP

SEQ ID NO: 3699 - protein, 635 aa, Apophysomyces variabilis
MREVKAGTKRTRQPEVQSVALQKAKKTGRASKQASSSNTAFIANPCPACGSTEHRSTRAKSCLRHTKSTEEILEYQLGKDFETFTRKALLHSVVIEAHRDQLQRKVQELSQYRREVTARTQLFVNQYILDHHVIPPICFTQNFFYSITQIVLNKSMTTKNDKIPTDLSSSWREFRDKHPQMQQAPNTQLRSSDVLSEACNMNKTDIQNIAWEYTFERIAGGSSQWPNLIEPDLPLVAIVDKICDDLEALRTNPATQQAISASPGAYIPTLKYILSSYEEEHEIVAASEKTSSDTTLPRLFSISPKTNLLSIREPTQPSEYPGVFFEALDLTSVGFNSLGDFTRNGNHRFACRILSDGFAVNLVFARKQKERVPATKIDLEDFTIDEVEQWFEPWAVDPGLNQIYTAADGSGSQRHQVRRVSTKEYYAMTGSTRRAKQLKKQKDAAGITRIETGLQSSFYGPGMAEKRLHNYQGVQRAREEIVNVLVNGGKKPQESGIRSTQNKLHPSTKKWHPKAFQASKKIPVVVFGSAMFGTSGHASRKGKRAPLVNTFDEFYTSQVCNSCLQRGLDKVTTSDSVSHHGVVVCKHCRTLWQRDINSAKNMFYIVNSVWRGQGRPIEFCRPAKNDIATTNVVSS

SEQ ID NO: 3700 - protein, 309 aa, Apophysomyces variabilis
MREVSKKGKGKEKSSASTSRSRKRKRKRQKRSSQAASSAKAKITEGNMPQMLSLVKPLFEKHSIPVCGVDPGIRTTGVSTKLRHDIYNTWTLRASAVNHHSRSSRHRLRRERAKNAEKEGTEAENRRIEREKRTREVFTQKAYHKYTDIERMHFSPYMIFQKAVHFYGHWQPTNSRIRGHARRGLKRLRGVQRRKGLVVIVNEYNTSKTCHWCLMPLQLQKYRGKDGKVRKCNGAVCCVNPNCVTVVNGCSTMNRDGNASKNIALKGVSMIVSSDGNPIPVFSSQYSSNYKLAQQFASQPTPVRLLHGP

SEQ ID NO: 3701 - protein, 722 aa, Apophysomyces variabilis
MSPTCLFFFTCRFRTLLIEKVMDKIIDYMSHVLYVGYHIANIAIREAYNLGNDAMLSFYELFLRNGKRMAQDLWRHIFYCSDILHSDGQLRGHNDDRMNLFTAFTADTAFFYLSRMLTILLERNVLLKARKLWYQDCSAEMCKAPTPIYMGEMVTEIANDASVDFRKNIQLVGLLQIKEDLMNSFIIHFVHDGIQHGAAQERQLRFQYIAEANIREQVNKFVTNMVNRYKNSNEAFDGDIDKLITALFQRIWGMSVDISEAGADQEDFEEYEQNQEEERQIEDFITAERNLQVKGIRVSEVNLSECLGENGTQRTNGGNNDEENGDEDDEDDVLHRTYGGKLSRAKAARLIPFMVYFLERREAGPNDRRIAELTRERDNLQNACFGLDFGEVCAAASVFRPREPGLYGSQLTIKRGYLYGRTIPNRDWLEARKAANNIDDIEAALSEGSPRSTMTDIGSTCDNSRQTRMVFGYGSFTPTDLSACYLITNQARRTFDMNHEMVDNRRHVDEPHLVYAFGLDGTSRKSRRGGLAFMDHKIANALYRKINQKNRNKDRQHADVCTRVDEYLTCKVCCRCSKEGQDRRIDFLRRPPTATVQDRARLENGQEKVLRVVQCANCDRTFHRDGNAADNQATIARDMLRFQQRPRWFVRPSRRLEAAGEKEAMVMTGRAGLQQRASGGEVTEVPEIAEPRRHPSEEAAVITPTARRRTRASQTETMVEPP

SEQ ID NO: 3702 - protein, 562 aa, Apophysomyces variabilis
MDNLSFDINSLIWAFFMISLNEFSAKEAIGTETRRDRLSPRLYEGRISYLKLTIARQLVCGYCGRSGHRDRRSYKCPLKEKKVGVKRKHQSDVQAESSKMAKERGRQRKQESAAKTPSTPRPCPGCDSTEHRNTRAKSCTAHKQSTNELLEAALGKNPEFYTCKITFDAVVLLGRSITTKNDNMPIDLEKSWQAFTHIHPVLLNPPRTTLRASDVLTEACVLLATSYSNNIVENFESRICSFVQYRLRGSHKKEAMDMASKYVFERIGGALTDSLCDDLEALVPKPASQETISASPGSYLPVLKYILSYYEEEHQRTVTENRSDDTSLPRLFPISPKPSAQWRFVSINAELMASLASLRRPQQPSDLDNFTQNANQRFACRILTDGFAVNLLFARRAREGTPDTELELEDFSLDEVNRYFEPWAVDPGHNQVFIAVDGSGSKSHQVRRVSNKEYYAMTWSERRAKTLQKDKDTHDEFYTSQVSAPYVMFGFMERYIQVCHACMRRDLSKVVTADGISHHGISVCKNCHILWQRDVNSAKSMYHIADSVWRGLGRPEEFRRPQ

SEQ ID NO: 3703 - protein, 1289 aa, Apophysomyces variabilis
MFRLSAMQVPHPQIRENKRKRKRVIQSNISLDKAIEALHDVFQNQLVTIISKELEDKPRKNTAKKARFQSEVEKQAKTNKILQELRTRLEKADRVPRTSLEQADDSINVTRGTIRRTLCFHYPEPASIGKLWRDYAAAHFNDAVAEARARLEEHGEVEEAGSSKEVTVNDDSKEEKEIIRTCSVRLSKILREDLDNQVKQTFLETIAITSEQATNYASELGTAVHATMLKYASGSVVLDAESKQAHYQQDGKTFNVLDVIHEEWIRHPELLNSELAIAVAPMPDNIKNYVKALPKKHNDEFLNLFTEAHLQFLHSDYFGRQSYKAQGKSFWSSLQHQGLKDLPKPPAGLSTVMHFQLKQYATDLQNMWAGGLFHKSINHLLRILLRINLASEREKKIQEITEKKLQEKEKQREESSRTMRRKKEWRRRKIKGRLKQERKSLRRLEKRLGIEMDGNQRANLLQRKKSCVEAIRRLEKQAKEKYRPKKADNQPHQKDEEARGDMDKLAISADISVMDDEGIEETIETAIEEAQDELEEVEIKTLKKEPSRRRLIRIQAITKKLLLSTDIDGNVQASDVSDIWNDNDELQKVEIDIVVKLANALRPYVPKGRLSSAISLRLRFVLLSNAILHATGYSKFTANICPTISPASIHALPLDAASMYEMFGSNSAKFNLYKEDGSTIDNIREARTNKSAVIGSFFDQEKVKHICNTRGLEPRWRITITPHQMAVIDGDVKKGRVIDTSHYEERKKKSKGKRADSASSQFEDKSGLDIANITCSLEDAKQRVKALESAEKQIKNALRQREEVVESRMESYRRSKDVARRKVRDKRKSEKFDIYDSRAKQKQTDIYKDLKAAKLERAKSQSELSKIRSQLADQRRLRYIYQKQLDILKKQQTNKETKPKDDEQEQETKLCKVASWNRPGCEANTEFLDISELHQEVKQDPKKTITFGGTDYGLRTLATTVPVTMERARLHFDLYNRQFGDGQTPVSIPKEMSTLPKPMRITAGYLEEKTLCRSFRKKRERRKKNNPAVISAEKTLSKRSSASATTVEQVLESQAVKRNCRRELRAFYHSNRAEHEKRTQKLYTDRIYDQVAAQERKFIKAAATTQTDGRQKALPIMAIGTQGTGVGLRLKGHLKRGGKWLRKRHRRYVPVSMTNEHRSSQLCVYCFERVERAKARRRKSRQWKTVRVNGASQCVNPCCPAYQSGHATQNRDVQAAVAIGLASASNILSANRSTLTPFDPSIFSAGKPFVPGATNFWCVNSSRKLCEELREPGPVAMTGVIRTYASEEF

SEQ ID NO: 3704 - protein, 1295 aa, Apophysomyces variabilis
MLPNLNFVGNPGLNMGDAISRSPTKNYEQCMQTVIAGARGRPISKENRSKALQWLQARGIQTVSKLFNTSPLEAALSVAVVRCLGDKQHAVSLRLSDNQTIPANGLLRLIAIAKMYNIRVYLFSTQSKPKVIGNNQSVYNMSLLHEVDSHTGTSRWVPLYIARFTSPKLPGPETTIEKSPFISPAATMKNVVGERRKKKQRAPLGVTEEVIKDELRKEINKRIHLEFSRITRNKNPTRAALEKFKEKFMNRNKTPKGLITSSGSSDHLFKTLKEKYGTKASPSALEQHFKGPDKPVLLWNDMARFFYRNQLKKITDHEIQAASVKDSKRKASDIHGDDSEGDNRSGDEPSEDEEQSDDEDDNHQEYVRVATTTLRKLVRPDIDLDTVLRGDVYQFIGYDNYSTQINLADVFPADYDFGDHKAKHSIVSLPFINADAAVDSNIFTFAQFQNMFYSTVGGIYTEQMYVLHLYINGVLSSLVDPNDDAVASQFQADSLRALYTAANNLYSGSLYPRSLANVIRLLLRVNLAPRRMSKYMQLVKEKAEEKKDRQEQRQDLRSNVQRRRNRSYWTKELKKAYMNGRPDNVVETIQRKIADNLPRKDRTEDQKKSNEEEIKSQKADDEYEAFRLDQAEDDLVNDSEGDEDTAATTSSQAPITSKETSARTIRTLVAIVRMLVESPLIKRTISAKDVADAVHTGTILTITEQQVAAKVANFLKPYTPRRNEPDEPPAKHILTVLPIAALSNVVSTILGMQDRVNKLTIETSNKWALPVKADGIYKIMIDAFDIPTNRQGEFITSGLQARTEKETVFKAFFQMDKIHRMMNRRHLFFRWRLVFVNEWTVRVVGTINRNTPHQVSALQERRNNQRFVEPEIELTLSKAQLQERIDRTQASILGLEQQLKPIQKEIGALEKERMNHSTSAHGRTNSTAYRKLKQTRQQIRSKQNTAIVLQEKLKQARRDRYVLNKAMREVSRKGKGKEKRSASTSRSRKRKRKKQKRSSQATSSAKAKITEGYMPQMLSLLKPLFEKNSIPVCGVDPGIRTTGVSTSTTSAWMIQRIRDFTSNTTTELRHDIYNTGSLRASAVNHHSRSSRYRLRRERAKNAEKEGTEAENRRIEREKRTREVFTQKAYHKYADIERMHFPPDMIFQKAVHFYGHWQPTNSRIRGHARRGLKRLRGVQRRKGLVVIVNEYNTSKTCHWCLKPLQLQKYRGKDGKVRKCNGAVCCVNPNCVTVVNGCSTMNRDGNASKNIALKGVSMIVSSDGSPIPVFNSQYSSNYKLAQQFASQPTPVRLLHGP

SEQ ID NO: 3705 - protein, 611 aa, Apophysomyces variabilis
MFVNGYIINHSRSEISVYVFSQNFWYSVCQLVLGKTITNTNPNFPESIKQEWLVYRALYSEIVYPLRGFVGYSHALSAACFSIAEAYTSHIVDNFYGRISTYSLYKLQRLVPYEPCSTDCLDFIMEVVANGEPKWPVHAVDLVSVYIVDSVWDILDELQAVIPLSYEQAALATSPGRYIPLLRHILARYTELHQEAEAASILMALASNNTTQHKQGISLPKLFSLAPLPAFQWRFVTVNSQALSTLASISLPRNNDYDSNLALFNQCFDLDRYGFNRIDFKQLGQPWMKGIQLEDLNIEEVQEYFRPAALDPGVRALFTASYGYSEETHAIRRCSTAKYYALTGSARRNNQLNKAKQTTGIKEIESKFPTAKTCSSVQYSEGLGRFYNYQGRQRARDEIANILINNGKKKDKRVRERQERLAGSPERTEPSHERRPESSIRSTNTNRRLPRWKKQKAKVDNDGKMPLIAFGNGMFNQRKTKFKGHPSGVVGKLWSSLKRRERQRQVLVVTVDEYLSSQVCHSCHQRTLQKMKTLDGVTHHGVLGCKNCGTLWDRDVNASKNLYEISLSVWSNGSRPAIFYRARDSQNDANITTSNVGSFSRRIYIVTLVGK

SEQ ID NO: 3706 - protein, 318 aa, Apophysomyces variabilis
MAYRKLKQTRQQIRSKQNTAIVLQEKLKQARRDRYVLNKAMREMLSVVKPLFEKNSIPVCGVDPGIRTNGVSTSTTSAWIIQRIRDFTSNTTTELRHDIYNTWSLRASAVNRHSRSNRHRLRRERAKNTEKEGTGAENRRIEREKRTREMFTQKAYHKYADVERMHFPQDMVSEKAVHFYGHWQPTSCYIRGHACRGLNRLRGVQRRKGLVVIVKEYNTSKTCHWCLKPLHCLLRDPNCVSVVNGCCTMNPDVECVEEHFTQRRIHDRITNGILIPVFSSQYQAIRSLHSNLLVNQPHFDFCMAREGQLPSKYKHCSE

SEQ ID NO: 3707 - protein, 1274 aa, Apophysomyces variabilis
MNEIQLPTPRGSARRKRKRQTEPQISYDQAKNTLLGVLLQKLKSTIANELWKNETKNSRKTKKGKQSAKTKGKRLKAQEKRMNRLRQALEKADRIPRGSFEEADKKAGVPKGTIEKQIRSRLSSSHKTGEFWRQCAVDNFDDVLAVVKAEGKQNRPKKKDEDSDNLFRTCTVPLKSVLRPDLDENLKRIFMHTVESTSVQMTDYVSDLATVVRATMLKYVSVSLSLDPASGSVKAELDQTSTGFDIRTVVPKEKLRDESMLVDDYFVPVARMPDNLSQFLDEMPGRRNNDLLSMFNENHIQFLHGLYFGTKGNVSKEKHYLWMQFHDQTLDNQPVIPDGLCRTSHFYMKQFSTNLKNMWAGSLYNRSMNHLLRVLLRVNLAPRREEKVREIREKAKLAREKEIEQQQVIKYQYRKKAIKRKLKNEKKQLRNLKKQIEQEEEDDILVRLATRAATCAEAIERLENQLLARSESRSNPKSIKVEQMNNRASVTKEEEQQAKILISLGETHIGVFEQIEEELEEEEKEETSEPSRRKLGILQAITKALLQSDKISGHVTVEDVLATSHADDAFSPQEIDTVVNIANALRPYVIRGQIAPCIPLRLNFVVLANALLCSIGYQEFTASICPTISPASVHALPLDAVAMYEMFGSSYAQLDIYKADGSVFTNRDEAIAEKRTVIGSFFNVEAIEKTCKERGLVPRWRITVTPQKTAIIDGNVCEQRRPIESRYEARRKKYYRKKEPYVQEPSIEQQSTPELAKTLDDTKKDVKTLETLKCQHTKLVKEATKLVAGLRSSYQENQAICQKRIRDKRKADKHENVTEKEAAYQQQKLSYEALKAAKLNWSNQQMALNQVHDRLANARRKKYKLEQLVKAHQKKKGKSPAGRKERKSKGGEDEKMEEADGDEEDTKYKKEKEKKKDKHNDNNDEENEEEDEEEEEDSLCRPQSGRRPGCEDSVGRLDLGPLLEDQNNVLTFSGTDYGLQVLSTTVPITRQRADFHLQLYNRYSMLGVNNVNDHDDDIDVSPTDMLQLPKPIRITAKSLDEKTLARTFRKKRERRKKSNTEVLAAEEQLKEASMEKAMSVQDIIRCQKIGRSCRKTLRDFYHSNRWHKEKVIQDLYKERIYDRVAANERRKIAMEAGPHDSGRRVIPVMAIGTQGTCVGSRLKGHPKRGGKWLRARHRRRYKEIKWRTMNGSSRCVNSKCVTFKAGRTTQNRDVQAAVAIGLAAISNLFSAERITLPPFDPSHFDAGISNIADTTVQRCVQSSSESHHTGRCYC

SEQ ID NO: 3708 - protein, 271 aa, Apophysomyces variabilis
MLPGIVMKNMAMRSYHHPRKNFTTSPHYNASKAIIDRMKNEKPKIQQIEKDMPSAKTASISQFDRYGRFLLLHMSTLHEYYDSRYASLRFWRHIGRQQASDEVAERLISGGSKYPTKNTRNQRRHHALSLTWTSRRRLDSSWKIEVEPVVEGCRIHLRGTRAGISNIIRRKIKENEARGRCKVVDVDEFKTSKICSGCGAKKLRNVKGSLGQSMYAVLHCEQYKTVWNRDCNARRNTRRIAEHMALNHNNRPSPFQRKNQLPGQTPSKTCK

SEQ ID NO: 3709 - protein, 504 aa, Apophysomyces variabilis
MGINISNNSSNFPQDLRDHWRTFLDNHPNALYPVRNISGYSDAFSATCVTLAITYSNNVAENFESRLKFYISRRLAKLIPGLSQKIAKAIAGDYIYELLARGDPHWPFEDALAVSDFDQAVEAIFIFTDGYAIDFQFASARKTESVVTEVRLSVENIDGSHIYDNFAPCAIDPGINQVFTASYGCGSEPHEISEMLNQRNYVYTGSPNRQNKMEKEKKQQGIQDIETSLESGKAAHIEAYDGYLRSIFGNMDLFFQFYGPCRAEARFRGYQGVQRAREEMVNILAFGEKPGKGSEKIGKKQVNKDPEVGNPLHQSLPQPNTSAERSSTLNKTKCLPHWKQKKFTIERKVPLIVCGDGMFNNRCNYKGYRKGIMNILWRSLKRRESREELLVPTIDEYLSSQVCHSCRCRSLQKLTTADCVSHHSILVCKNCKMLWDRDVLASKNFILDCEVNLVWARKTRRVCLALIRSIYRRYEYGWSLWGLLGFYGGHTGKFTITFFTEDTH

SEQ ID NO: 3710 - protein, 560 aa, Apophysomyces variabilis
MKPCLLNPTTTFEVLCNVKDNNMDGFDVFGPDGKTITTLPDARHNPDYHGLKFDHVIKVSPHHTAAIQGIVLDSRELVRSRYDKRKKSTRASASAIKKAQESSVVAAIEISIKESTSSMKKIEAKIKDCTGNIQSLSDQIDTKKRSKYDTSSAIADRQILKKERQQKNRKLLSECKKLQDLRHQKFIAINDNIQQQLRKEEEKRAKERKKSKKPKEDKESMTKVTSKHYKHEDDASKMDLSGLADNQAENILFSGTDYGFVTMSETVALPMERLNYHLKLYNRFTALESEEAASSDNTEGSEEKKSDDDDGSWEFQKIAKPFKIKAKYIENISFTRRVAKQREYRKRATEQGRRVKEIENRLKENSVKFATSMKDLTNYRKVAMDGRSDLREFYMQKKSVRKWKRTQQIYTQKAYSKIASAERQHLKKSGKDKDILIMCTGDAGTTMSFEVRRHVPTVCSRLHTIRRGKQISASQIMVSVTCTNCECPSVKMGYATRGRDTNAAVNIALAGSTRMLSSSYRPLPVFCRQKNARAYDLDMKMLNSFLAISDGVRKECLRQQ

SEQ ID NO: 3711 - protein, 730 aa, Apophysomyces variabilis
MLQAVFEWCCSKLTALIPRSYEWNWQGIVCLCKIRKYFQQEAERLKREEGKVIFRAQLLVNSYIIANCDRPVPSYIYTQNFWYSACQLIMGINISNNNPNFPQDLRDHWRAFLDNHPNALYPVRNFSGYSDALSAACVTLATTYSNNVAENFEGRLKFYISRRLTKLILGLSQKNAKAIAGDYIYELLARGDPHWPFEDELAVSDFDQAVETICGEFATLMPEWQTNAEKLSAFPGSYIPVLAYILTEYNREHEEAKQKQNAQGEQYDPKNEEAEKAKGSFKDLPRLFSLSPSPSTHWRFICVNSKTLQQLTNISHRKDYEDQLAQFYQVFDFHKLGFDSLEQLQNFGNSGRIAFKNVIFTDGYAIDFQFARARKIESVVTDASLSVEDIDGNHIYDNFAPCAIDPGINQVFTASYGCGSEPHEIRRCSTKEYYVYTGSPNRQNKMEKEKKQQGIQDIETSLESGKTAHIEAYDGYLRSIFGNMDVLFQFYGPHRAEARFRGYQGVQRAREEMVNILAFGGKKYNCSRRKRTRSNRKSRKRKRKSRKKQVNKDSEVGNPLHQSLPQPNTSAERSTLKKTKRLPHWRQKKFTVERKVPLIVFGDGMFNNRCNYKGHRKGVVNILWRSLKRREKREELLVLTIDEYLSSQVCHSCRYRSLQKLTTADCVSHHSILVCKNCKMLWDRDVLASKSLFLIAESIWSGQGRPREFARPSLDQYTAVTNTVGPSGDF

SEQ ID NO: 3712 - protein, 267 aa, Apophysomyces variabilis
MDIREMTEDPSTGITFSGTDYGVITMSESASLPIERFACDLKLHNRFSALETQDDETEDDLASDFQKIPKTFKITAKQIDDLSFTRRVRRQREYRKRATKEGKKVKAIEKKLSKNNVGNAVDIDSLHNYRKIAIDNRDILRKFYLEKKSVKKSKHTQDIYTQKAYATVASNERNFLNRSGKKTNVLLMMTGSAGTGVCSSIRGHYRRGGKKLREQHLQQTSVGITNEFCSSQLCPYGYQLLSHPEQEKRWRYQEKLWHSLIYKFRMH

SEQ ID NO: 3713 - protein, 705 aa, Apophysomyces variabilis
MDNLSFDINSLIWAFFMLSLNAFSAKEVIGTETRRDRLSPRLYEDRISYLKPTIARQLVCGYCGRSGHRDRRSYKCPLKEKKVGVKRKHQCDVQAESSKMAKERGRQRKQQTASKTSSTPRPSPGCGSTEHRNTRAKSCTAHKQSTNELLEAALGKNPEFYTRTITFDAVVREEYRDQVRTKIEELSSYLRLVVTRTQLFVNQYIIDHDVIPAICFTQNFFYSIMQLVLGRSITTKNDNMPIDLEKPWQAFTHIHPVLLNPPRTTLRASDVLTEACVLLATSYSNNIVENFESRTCSFVQYRLTSWFPTLSKKEALDMASKYVFERIGGGTPEWPDGIEPTLPLVALTDGLCDDLEALVPKPASQETISASPGSYLPVLKYILSYYEEEHQRAMTENRSDDTSLPRLFSISPKPSAQWRFVSINAELMASLASLRRPQQPSDLDDFTQNFNQRFACRILTDGFAVNLLFARRAREGTPDTELELEDFSLDEMNRYFEPWPVDPGHNQVFIAVDGSGSKSHQVRRVSNKEYYAMTGSERRAKRLQKDKDTHGITTIETNMIACKTALSQRHHEFVACFLEKFPSLARFYGPCMAKIRFRNYQGTQRAPEELANILVNGDEFYTSQVSASYVMFGFMERYIQVCHAWMRRDLSKVVTADGISHHGISVCKNCHILWQRDVNSAKSMYHIADSVWRGLGRPEEFRRPQ

SEQ ID NO: 3714 - protein, 867 aa, Apophysomyces variabilis
MLQAVFEWCCSKLTALIPRSYEWNWQGIVCLCKIRKYFQQEAERLKREEVFCKDCGQNGHPNKRYKACPLNARHGKKPVGVKRKLNATEEAEFSAAKKRGRQLKAEETSNPNKSNKPCPSCGGIDHSKSSSKNCRKPSKTKKSVIAEKLNDNHYETFTRKLPTSSVVRQEFREIFQENSVRLSAFLREVIFRAQLLVNSYIIANCDRPVPSYIYTQNFWYSACQLIMGINISNNNPNFPQDLRDHWRAFLDNHPNALYPVRNFSGYSDALSAACVTLATTYSNNVAENFEGRLKFYISRRLTKLILGLSQKNAKAIAGDYIYELLARGDPHWPFEDELAVSDFDQAVETICGEFATLMPEWQTNAEKLSAFPGSYIPVLAYILTEYNREHEEAKQKQNAQGEQYDPKNEEAEKAKGSFKDLPRLFSLSPSPSTHWRFICVNSKTLQQLTNISHRKDYEDQLAQFYQVFDFHKLGFDSLEQLQNFGNSGRIAFKNVIFTDGYAIDFQFARARKIESVVTDASLSVEDIDGNHIYDNFAPCAIDPGINQVFTASYGCGSEPHEIRRCSTKEYYVYTGSPNRQNKMEKEKKQQGIQDIETSLESGKTAHIEAYDGYLRSIFGNMDVLFQFYGPHRAEARFRGYQGVQRAREEMVNILAFGGKKYNCSRRKRTRSNRKSRKRKRKSRKKQVNKDSEVGNPLHQSLPQPNTSAERSTLKKTKRLPHWRQKKFTVERKVPLIVFGDGMFNNRCNYKGHRKGVVNILWRSLKRREKREELLVLTIDEYLSSQVCHSCRYRSLQKLTTADCVSHHSILVCKNCKMLWDRDVLASKNLFLIAESIWSGQGRPREFARPSLDQYTAVTNTVGPSGDF

SEQ ID NO: 3715 - protein, 544 aa, Apophysomyces variabilis
MPDNIYDFWNQFRERHPAIVFPRNNFTGYSDALSAACKTLRDTSTNDIVENFQQRFCGFIIHRLQMLVPDLSKSSASRITYDYLYESIAGVEPAWPSCLENASFDLFLAVVNLRDFLIPLMPQTCTLEALSERPGVCISVLRPILDMYEQEHQQNDDKESGNLPRLFSLAPQPSFHFRFVTINAKALRALVQVRNDTDDYEGNLEIFNQVFDLNNYGFRSMNCGTFTNEICTDGFSVVFHFARSAKLNTVELELEDFITEDINRYYRVCGIDPGVRHLYTASYGAGETEHEIRRCSSAEYYCMTESPQRGQQLLKQIRHQGIDTIESNFQVQKHAISANAMDEWITFSCTKMCYSISTGQIDRERRFRDHQGRQQAVEELANILIDGRRKYNYRKRKHRGANRKKRKKNREQRRRHKKMNTGRIPEQPLSAVRSTVNESRRARSWKQSQPNPDNNGKMPLFVFEAGMFGKDKCRYKGRRKAAVNKLWRILKRREARGEVLVVKIDEYLTSQICHKCKTKSLCNVVTEDGIKHHGIQDYKTCRMR

SEQ ID NO: 3716 - protein, 399 aa, Apophysomyces variabilis
MHGSTMTMKTVTLSVNQAEPPPSDNSLEAKGSGSKPRQKKHGADPGVADIYVCSNGSNDVYRDEADLELEDDQDIPDEDIVELPEPEVAEGENDDTEFEPHQIRQHSTVEYYARAGFKKTTQRINTSKTPLIRRLDSEIDTNRTADMDRIIRSIVSTLDALPEVTAFYAQQDIQGLKFLNYQGRQRLDEEMVKIFINGGTKYRDPLGNADCLFRARQQDQRMDNETLRPDGTRRWRRRRIQRQEAGEPSPPSHPSKEDKWRKSFTENDTAKLLVVVYCASRFGRNVYKGKPCGLADRFRKLLKRTDTSGRLIMIKMDEYNTSQVCSRCGTKSLTKLDPSGYRCLYSVLVCSSCHTVWQRDVNASRNIRATFMAMIQQRDRPVIFTRPRMTTTAPRNRNV

SEQ ID NO: 3717 - protein, 1638 aa, Apophysomyces variabilis
MFRLSAMQVPHPQIRENKRKRKRVIQSNISLDKAIEALHDVFQNQLVTIISKELEDKPRKNTAKKARFQSEVEKQAKTNKILQELRTRLEKADRVPRTSLEQADDSINVTRGTIRRTLCFHYPEPASIGKLWRDYAAAHFNDAVAEARARLEEHGEVEEAGSSKEVTVNDDSKEEKEIIRTCSVRLSKILREDLDNQVKQTFLETIAITSEQATNYASELGTAVHATMLKYASGSVVLDAESKQAHYQQDGKTFNVLDVIHEEWIRHPELLNSELAIAVAPMPDNIKNYVKALPKKHNDEFLNLFTEAHLQFLHSDYFGRQSYKAQGKSFWSSLQHQGLKDLPKPPAGLSTVMHFQLKQYATDLQNMWAGGLFHKSINHLLRILLRINLASEREKKIQEITEKKLQEKEKQREESSRTMRRKKEWRRRKIKGRLKQERKSLRRLEKRLGIEMDGNQRANLLQRKKSCVEAIRRLEKQAKEKYRPKKADNQPHQKDEEARGDMDKLAISADISVMDDEEIEETIETAIEEAQDELEEVEIKTLKKEPSRRRLIRIQAITKKLLLSTDIDGNVQASDVSDIWNDNDELQKVEIDIVVKLANALRPYVPKGRLSSAISLRLRFVLLSNAILHATGYSKFTANICPTISPASIHALPLDAASMYEMFGSNSAKFNLYKEDGSTIDNIREARTNKSAVIGSFFDQEKVKHICNTRGLEPRWRITITPHQMAVIDGDVKKGRVIDTSHYEERKKKSKGKRADSASSQFEDKSGLDIANITCSLEDAKQRVKALESAEKQIKNALRQREEVVESRMESYRRSKDVARRKVRDKRKSEKFDIYDSRAKQKQTDIYKDLKAAKLERAKSQSELSKIRSQLADQRRLRYIYQKQLDILKKQQTNKETKPKDDEQEQETKLCKVASWNRPGCEANTEFLDISELHQEVKQDPKKTITFGGTDYGLRTLATTVPVTMERARLHFDLYNRQFGDGQTPVSIPKEMSTLPKPMRITAGYLEEKTLCRSFRKKRERRKKNNPAVISAEKTLSKRSSASATTVEQVLESQAVKRNCRRELRAFYHSNRAEHEKRTQKLYTDRIYDQVAAQERKFIKAAATTQTDGRQKALPIMAIGTQGTGVGLRLKGHLKRGGKWLRKRHRRYVPVSMTNEHRSSQLCVYCFERVERAKARRRKSRQWKTVRVNGASQCVNPCCPAYQSGHATQNRDVQAAVAIGLASASNILSANRSTLTPFDPSIFSAGKPFVPGATNFWCVNSSRKLCEELREPGPVAMTGVIRTYASVLFEQTDEDFKRHFRNVTIDYASLLAALHVQFVLGVVKELNSEEKVVILHDGREIAYGYCVICTGSSYKIPWKVSCESTTSLEERFEYLQSQRDLYKQAKNILCIGAGAVGVEVASEICSRDPSKRVTLINSGPMALASAPGNLGASAQTVLSNIPSLSLISNELASSNDGKHYQTNKSKTVITADLVYQCVGITPNTEFLHQTHPQWLNEKRFIKVDSFLKASYEVFAIGDVNDSGDPKMFFNAHMQAVHTARNIQRILKGHEPIPYKGSRPAMVVSLGPNHAVGYVAGISLTGWPFNRRQGSKLASISKGMIERITMDDLYLEKPTNRVLYYTHEKGQLIPQILAKICLT

SEQ ID NO: 3718 - protein, 709 aa, Apophysomyces variabilis
MDHINEVIGKKRKATEVDTEEQKAEKKKGRTSRDALNAKPDAARRQRRNRTIKQEIQARYGNEVERFSRKIPFQNFVRPEYAILLQSRITSLSEFMRNLIIRMQFFVNAYIIEYSQREIPVYLYSQNFWYSIAQLVMNISVTHTNPHMPDNIYDFWNQFRERHPAIVFPRNNFTGYSDALSAACKTLRDTYTNDIVENLQQRVCGFIIHRLQMLVPDLSKSSANRITYDYLYESIAGGEPAWPSCLENASFDLFLAIVNLRDFLISLMPQTCTLEALSERPGVCIPVLRAIVEMYEQEHQQNDDEESGNLPRLFSLAPQPSFHFRFVTINAKALRALVQVRNDTDDYEGNLEIFNQVFDLNKYGFRSMNCGTFTNEICTDGFSVVFHFARSAKLNTVELELEDFITEDINRYYRVCGIDPGVRHLYTASYGAGETEHEIRRCSSAEYYCMTGSPQRGQQLLKQKRHQGIDTIESNFPSAKTCDIRKYNGRVDYFFLHKDVLFNFYGPNDRERRCRDHQGRQRAVEELANILIDRRRKYNYRKRKHRGANRKKRKKNREQRRRHKKMNTGRIPEQPLSAVRSTVNESRRARSWKQSQPNPDNNGKMPLFVFGTGMFGKDKCRYKGHRKAAVNKLWRILKRREARGEVLVVKIDEYLTSQICHKFKTKSLCNVVTEDGIKHHGIQDCKTCRMRWNRDINASKNMFYIAQSI

SEQ ID NO: 3719 - protein, 539 aa, Apophysomyces variabilis
MAVADSNHVVENYSQRMEKYIKYCLQIELASRTPVNVFRLTHFVQTQEKLKIDITTEDIKKLAKFAYDIGAKGQPHYLYSVVPRDEFKIEINTVLQNVNIRPENVPVTSTELAAKPHVYMRPLLAEDLPKLEKANDNGVTCIILCAKRTSLNAPNLFDEVIRSVFEDNISSVDYVYIQKLLAKTARKLVRGVFMPKIQGSSERLFTIMPRTATTWRYTQIDHQTLASLVGVSQRANKDEMFWESFDFTKTKEIRSLDEMKNSNQKMFRTLATDGYIAPFTFSRKRQHLTEDKKSAKTMKDFQEDLHGFDLKVNFTTSPHYNASKAIIDRMKNEKPKIQQIEKDMPSAKTASISQFDRYGCFLLLHMSTLHEYYDSRYASLRFWRHVGRQQASDEFAERLIFGGSKYPTKNTRNQRRHRKQKKKRRKRQNKTKAGTVKRTEISDTELRNEWSKATPHPTKRKPLFASGSAMINSTLKGIRAEISNIIRRKIKENEARGRCKVVDVDEFKTSKICSGCGAEKLRNVKGSLGQLLHVVMHWE

SEQ ID NO: 3720 - protein, 579 aa, Apophysomyces variabilis
MREVKANPCPACGSTEHTSTRAKSCLRHTKSTEEILEDQLGKGFETFTRKAPLHSIVIEAHRDQFRRKVQELPQYASEVIARTQLFVNQYILDHQVIPPICFTQNFFYSVTQLVLNKSMTTKNDKMPTDLSSSWREFRDKRPIHNYDHLMYFENFKTRVRSFVEHKLSVAFPNKNKTEIQNIAWEYAFERIAGGSPQWPNLIEPDLPLVAIVDKICDDLEALTPKPATQQAISASPGAYIPTLKYILSSYEEEHKIVAASEKSSSDATLPRLFFDFTKTNKSSVRKKQKEKVPATEIDLEDFTIDEVEQWFEPWAVDPGLNQIYTAADGSGSQRHQVRRVSTKEYYAMTGSTRRAKQLEKQKDAAGITRIETSLESCKTASSEQHHQFVECFAQNFPVLTAFYGPCMAEKCFHNYQGVQRARAELVNVLVNVGKKPQESGIRSTQNKPHSSTKKWHPKEFQASKKIPLIVFGSAMFGTSGHASRKGKRAALVNTFDKFYTSQVCNSCLQRGLEKVTTSDSVSHHGVVVCKHCRTLWQRDINSAKNMFYITNSVWRGQGRPIEFCRPAKNDIATTNVVSS

SEQ ID NO: 3721 - protein, 656 aa, Apophysomyces variabilis
MREVKAGTKRARQPEVKSVALKKAKKTGRASKQASSSNTAFIANPCPACGSTEHRSTRAKSCPRHTKSTEEILEDQLGKGFETFTRKAPLHSVVVEAHRDQLQRKVQELSQYTREVIARTQLFVNQYILDHQVIPPICFTQNIFYSVTQLVLNKSITTKNDKMPTDLSSSWREFRDKHPQMQQVPNTQLRSSDVLSEACNMNKTEIQNIASKYAFERIAGGSPQWPNLIEPDLSLLAIVDKICDDLEALTPKPATQQAISASPGAYIPTLKYILSSYEEEHKVVAASEKVLWRFVSINAKLLASLLSIREPTQPSEYPRVFFEALDLTRFGFNSLGDFTGNGNHRFACRILSDGFAVNLVFARKQKERLPATEIDLEDFTIDEVEQWFEPWAVDPGLNQIYTAADGSGSQRHQVRRVSTKEYYAMTGSTRRAKQLEKQKDAAGITRIETGLESCKTASSEQHHQFVESFAQNFPVLTAFYGPGMAEKRSHNYQGVQRAREELVNVLVNGGKKPQESGIRSTQNKPHPSTKKWHPKAFQASKKIPLIVFGSAMFGASGHASRKGKRAALLNTFDEFYTSQVCNSCLQRGLEKVTTSDSVSHHGVVVCKHCRTLWQRDINSAKNMFYIANSVWRGQGRPIEFCRPAKNDIATTNVVSS

SEQ ID NO: 3722 - protein, 276 aa, Apophysomyces variabilis
MNHEMDDNQRHIDEPRLVYAFGFHGMSRKSRRGTLASMDHKIANALYRKIKQKNRNKDRQHADVCSRVDEYLTSKVCCRCSKEGQDRRVDFLRRPPTAPVQDRARLENGQEKVLRVVQCANCGRTFHRDGNAADNQATIARYMLRFQQRPRWYIRPSRRLEAAGKEEAMVMIGRAGLQQRDSGGEERASGREVAGAQEVPGIAEPRRRPSKEAAVITPTARRRTRASQTETMVDPPRSRRRISQREEERAESSRAPLRRSERQQAKRQKRIHESSG

SEQ ID NO: 3723 - protein, 514 aa, Apophysomyces variabilis
MTGVSSAAKEYEDAIRNHVCANFKKKTTQCLLICMSDKNDEAFWESSTVKDRNIMAENQGIIDISESLVKLVRSTFSLVNTNPLSKRLRSSLKYAAREAIGRKSSLRLPKRFKPLPEAETASHEAFIEETIDAIESNTFQMRHITIDNQALARLLFQAGRRDNQTPVNPSETRREYFYLFDMAKIGYPTYESLENEKTMFWDVIRTDGVDVKFVFKKYREPFNSKKKPLIPANLKGKCDNAVIWGVDPGVSSLFVAADGNPSSPHRVCTSTTTEYYSICGYNRANQRRKQYMDAEHEAKKLIDDITSLKTSELRKLTDSVKYVMQHYETITEFYSRDLRYNKLKFKTYIGRQKGRGEIAKRLLCDSKKYNMYSSQNRKKPNEKKWVAHYLNDRQNERNGPIIIAYGNGTFSGSMHGRVAAPTKAIVKELKRQAFRRKSPAYVSMIEEYLTSQICPRGKEKPPKKQGTPGCKWSRRRGNTCCVGLSEIIMPGNILEPQSYGCHEYPRSILIRDKQ

SEQ ID NO: 3724 - protein, 383 aa, Apophysomyces variabilis
MVLRAYKGLCWKAEKLQDPGYEKRKKKHARPSATILRKAQESDTVTAIGKHFNFRHDKYLAVQVIVDEEIEKSNQKLSKGRKRKRKTKDKDLTKITANSFKCEDDVLKMDIRGMTEDPSTGITFCGTDYGVITTSESVSLPIERFAYHLKLDNRFSALETQDDDTDDDLASDFQKIAKTFKITAKQIDDLSFTRRVRRQREYRKRATEEGKKIAIDNRDTLRKFYSEKKSIKKSKRTQDIYAQKAYAIVASNERNFLNGSGKKTDILLMMTGSAGTGVCSPIRGHYRRGGKKLREQHLQQTSVGMTNEFRSSQLCPFCYQDLSHPNKKKDGDIKKNFGTVICTNSECISVKKGHDSRGRDQNAALNIALAKTSALFSKHHKPF

SEQ ID NO: 3725 - protein, 730 aa, Apophysomyces variabilis
MLQAVFEWCCSKLTALIPRSYEWNWQGIVCLCKIRKYFQQEAERLKREEGKVIFRAQLLVNSYIIANCDRPVPSYIYTQNFWYSACQLIMGINISNNNPNFPQDLRDHWRAFLDNHPNALYPVRNFSGYSDALSAACVTLATTYSNNVAENFEGRLKFYISRRLTKLILGLSQKNAKAIAGDYIYELLARGDPHWPFEDELAVSDFDQAVETICGEFATLMPEWQTNAEKLSAFPGSYIPVLAYILTEYNREHEEAKQKQNAQGEQYDPKNEEAEKAKGSFKDLPRLFSLSPSPSTHWRFICVNSKTLQQLTNISHRKDYEDQLAQFYQVFDFHKLGFDSLEQLQNFGNSGRIAFKNVIFTDGYAIDFQFARARKIESVVTDASLSVEDIDGNHIYDNFAPCAIDPGINQVFTASYGCGSEPHEIRRCSTKEYYVYTGSPNRQNKMEKEKKQQGIQDIETSLESGKTAHIEAYDGYLRSIFGNMDVLFQFYGPHRAEARFRGYQGVQRAREEMVNILAFGGKKYNCSRRKRTRSNRKSRKRKRKSRKKHVNKDSEVGNPLHQSLPQPNTSAERSTLKKTKRLPHWRQKKFTVERKVPLIVFGDGMFNNRCNYKGHRKGVVNILWRSLKRREKREELLVLTIDEYLSSQVCHSCRYRSLQKLTTADCVSHHSILVCKNCKMLWDRDVLASKNLFLIAESIWSGQGRPREFARPSLDQYTAVTNTVGPSGDF

SEQ ID NO: 3726 - protein, 633 aa, Apophysomyces variabilis
MVSTQDNSSKEKPRSLKGKEKATFDSDDDFQPLPPPQRKRMKFVEAVEEVVKHVRDITYAGSLLANSFFVRLLSENRRIPPITHDLCYRLFSLIAGKGKSADDDLQEVYANFKTSIPEFDEEKFRSQGYMTIVSTATKEYEESIRSHITANFEPKTIQYLLVCMSDQDDKLFQWKGLVKDRKILAEFIYKQACGTKARWPTAIPDNKQNRAYVKTCVESLKNFIGVIFIDEKKLNDEPHLFFPWLFKILGDVNLPKRLTNSLEVAVRIAIRRRKELFLTKKFDRLPKSVILKLQNFIKGTGEAIDNGAFKPEKYTDPRGARRFTMPPVYNMQMRHVTIDNQALGRLMWKAGLRSTMSPIKATEVRKEYFQLFDTSKMGYKTLESLETEKILFWDKIRTDATDVEFIFKKYKTPYDPKKKPLTPSDIKGKYEDAIVWGVDPGVSSIFVAADGVRSTTTEEYYSLCGFSHATRSREKYVKGDPAAKTLIDNIPSLKTTSMESLITAIRYCMQHYEHISEFFSRDRRYSKLKFKCYIQRQKGRSEVAKRLLYGSKKYDQSSKQKEPKRGDSKWVPLSPNDRSDEKSKPIIVAYGNGGFSGSMKGKKAAPTKAVFKELQQQARRRKVGYIVISSAYG

SEQ ID NO: 3727 - protein, 816 aa, Apophysomyces variabilis
MKEYWQYKGTKNEITDLDENNQPSIVPQDLAKHVPPTEASLDAGYLPGPSTSKKSKALAKAEKAYAKWNAKFDAKAKLLEDKQEERIASGNTLRCSTGGGTDHQRRTSKLCQDHKKKRKPPKNFKRTSVMKTSLANTCRSAEFVRSIEDVVKHIQDVTYVGSLFANFFFVQLLSENQNIPPITHDLCYSIFSMIAGEGKNANESLQEAYLRFKVSVPEYKEAKFRSRGYMTVISSAAKEYEEAIRNHLTANFEPKTIQYLLVRMSDEKDEAFRWKSTVAERRLLANFVYKKACGTEAPWPKSITDNRHNRDYVKSCVEFLQQSIGITEIDETKLNAKPHLFLPWFFQVLKRLEQKIFIAEPTAQKYVSPGYIHRMVDKVLDKERLPKRLVKSLEDNVRIAIRKREKLSLAKKFARLSETALSKLQEFIKETGDAMDAGIFKAEKHTDPRGMRRFTMLPVYSTQMRHITMDNQALGRLMCKSGLRDTLAPVKPDEAREVYFKLYDMSKIGYRTIEDLETEKVLYWDKIRTDGTDVEFIFKKYKAPYDPKKKPLTPSDMKGKFDDALIWGVDPGVASVFVAADGTHDSRHRVRSTSTEEYYSLCGFNHASRVREKYNKQEPAIKDLIDKTPSLKTSDLEKLIIAIRYCIQHYDTISEFFCRYQRSYSKENTCKSSDSKWVPLSANDRPEEKEKPIIIAYGNGAFSGSMKGRKAAPTKAILKELQQQARQRKAPTFVFLIDEYLTSQICPVCQKQNLQNAKEGKDARGQEGSKIHAVLICSNKSCTAMFWESRLYGCIQHFARFLAHERLCQSTTRSLY

SEQ ID NO: 3728 - protein, 259 aa, Apophysomyces variabilis
MNCGTFTNEICTDGFSVVFHFARSAKLNTVELELEDFTTEDISRYYRLCGIDPGVPHLYTASYGAGETEHEICRCSSAEYYCMTGSPQRGQQLLKQKRHQGIDTIESNFPSAKTCNIRKYNGRVDYFFLHKDVLVNFYGPNDRERRFRDHQGRQRAVEELANILIDGGRKYNHRKRKKNREQRRRHKNKNTGRIPEQPLSAVRSTVNESRRARSWKQSQPNPDNNGKMPLFVFGAGMFGRTSADTKDIEKRPLTNYGGF

SEQ ID NO: 3729 - protein, 481 aa, Apophysomyces variabilis
MQLVLGRSITTKNDNMPIDLENSWQAFTHIHPVLLNPPRTTLHASDVLTEACVLLATSYSNNTVENFESRICSFVQYRLTSWFPTLSKKDAMDMASKYVFERIGGSTPEWPYGIEPTLPLVALTDGLCDDLEALVPKPASQETISASPGSYLPVLKYIFSCYEEEHQRAMTENRSDDTSLPRLFSIFPKPSVQWRFVSINAQLIASLASLRRPQQPSEYSEDFTQNVNQRFACRILTDGFAVNLLFARRAREGTPDTELELEDFSLDEVNRYFEPWAVDPGHNQVFIAVDGSGSKSHQVRRVSNKEYYAMTGSERRAKTLQKDKDTNGITTIETNMITCKTALSQRHHEFVACFLEKFPSLARFYGPCMAKIRFRNYQGTQRALEKLANILVNGDEFYTSQVSAPYVMFGFMERYIQVCHACMRRDLSKVVTADGISHHGISVRKNCHILWQRDVNSAKSMYHIADSVWRGLGRPEEFRRP

SEQ ID NO: 3730 - protein, 808 aa, Apophysomyces variabilis
MKSMCENKSSVATLDWRIKYQTRRLRKLENRVSADDPRVQKLSAIIATLKSTRSNLLAQRSNQKELASNPSRETEDDEMDKVQLNDEDAEWERNGEEDEEDEEYQNGTKNDGKEAEEEEEVPTSGSHQAREKRPILASTSSEPNSKKRKITQETSRSRLQRLTTLRKRLLALEDVSVDNITVRKLQKEFSTAELYLKEAEAVIDLAVDRHPLLNAPLVLLANAVFTITDNKKFTRSIYPAVRPSAIYSLVLNPTTTFEILCCTRDDMDGFDVVGPNGKTMTSCPDATHNPKYILGAFFDLERIDRICHKHGLKFDNVLKISSYGSTSIQGTVLKSRKVARSRYEKRKKKHARPSATILRKAQESDTVTAIGKDIVKTTGKVKQLENSLRDRTETICLLTEEINAIKDGRPNTSNAEDLIDTIAFRNGLKNERKQENKKLLLERKKLQNFRHDKYLAVQAIVDEEIEKSDQKLIKGRKRKRKTKDKDLTKITANSFKCEDDVLKMDIRGMTEDPRTGITFSGTDYGVVTMSESVSLPTERFAYHLKLHNQFSALETQDKDTDDDLASDFQKIPKTFKITAKQIDDLSFTRRVRRQREYRKRATEEGKKVKAMEKKLLKNNVGNAVDIDSLHNYRKKAYATVASNERNFLNGSGKKTNVLLMMTGSAGTGVCSPIRGHYRRGGKKLREQHLQQISEGMTNEFRSSQLCPFYYQVLSHPNKKKDGYIKKNFGTVICTNSECISVKKGYGSRGRDQNAALNIALTGTSALFSKHHEPFPEFNPKKASKYLLDNNLLASLMSIPEGCGVGARA

SEQ ID NO: 3731 - protein, 670 aa, Apophysomyces variabilis
MRSKLCPTREVKAGSKRTRQPEVQSVALKKAKKTGRASKQASSSNTAFIANPCPACGSTEHRSTRAKSCLRHTKSTEEILEDQLWKGFETFTRKAPLHSVVVEAHRDQLQRKVQELSQYTREVIARTQLFVNQYILDHQVIPPICFTQNFFYSVTQLVLNKSMTTKNDKMPTDLSSSWREFRDKHPQMQQAPNTQLRSSDVLSEACSMNKTEIRNIAWEYAFERIAGGSTQWPNLIEPDLPLLAIVDKICDDLEALTPKPATQQAIPASPGAYIPTLKHILSSYEEEHEIVAASEKSSSDTTLPRLFSISPKPSCKWRFVSINTKLLASLLSIREPTQPSEYPRVFFEALDLTRFGFNNLGDFTGNGNHRFACRILSDGFAVNLVFARKQKERLLATEIDLEGFTVDEVEQWFEPWAVDPGLNQIYTAADGSGSQRHQVRRVSTKEYYAITGSTRRAKQLEKQKDAAGITRIETGLESCKTASAEQHHQLVECFAQNFPVLTAFYGPGMAEKRFHNYQGVQRAREELVNVLVNGGKKPQESGIRSTQNKPHPSTKKWHPKAFQASKKIPLIVFRSAMFGASGHASRKGKRAALVCNSCLQRGLEKVTTSDSVSHHGVVVCKHCRTLWRRDINSAKNVFYIANSVWRGQGRPIEFCRPAKNDIATKNVVSS

SEQ ID NO: 3732 - protein, 669 aa, Apophysomyces variabilis
MELQKQLQEEERLKKAGTKRTRQPEVQSVALKKAKKTGQASKQASSSNTAFIANPCPACGSTEHRSTRAKSCLRHTKSTEEILEDQLWKGFETFTRKAPLHSVVVEAHRDQLQRKVQELSRYTREVIARTQLFVNQYILDHQVIPPICFTQNFFYSVTQLVLNKSMTTKNDKMPTDLSSSWREFRDKHPQMQQTPNTQLRSSDVLSEACSMNKTEIQNIAWEYAFERIAGGSPQWPNLIEPDLPLVAIVDKIRDDLEALTPKPATQQAISASPGAYIPTLKYILSSYEEEHEIVAASEKSSSDTTLPRLFSIPPKPSCKWRFVSINAKLLASLLSIRESTQPSEYPRVFFEALDLTRFGFNNLGDFTGNGNHRFACRILSDGFAVSLVFARKQKERLPATEIDLEDFTVDEVEQWFEPWAVDPGLNQIYTAADEYYAMTGSTRRAKQLQKQKDAAGITRIETGLESCKTASSEQHHQLVECFAQNFPVLTAFYGPGMAEKRFHNYQGVQRAREELVNVLVNGGKKPQESGIRSTQNKPHPGTKKWHPKAFQASKKIPLIVFGSAMFGASGHALRKGKRAALVNTFDEFYTSQVCNSCLQRGLEKVTTSDSVSHHGVVVCKHCRTLWQREINSAKNMFYIANSVWRGQGRPIEFCRPAKNDIATTNVVSS

SEQ ID NO: 3733 - protein, 867 aa, Apophysomyces variabilis
MLQAVFEWCCSKLTALIPRSYEWNWQGIVCLCKIRKYFQQEAERLKREEVFCKDCGQNGHPNKRYKACPLNARHGKKPVGVKRKLNATEEAEFSAAKKRGRQLKAEETSNPNKSNKPCPSCGGIDHSKSSSKNCRKPSKTKKSVIAEKLNDNHYETFTRKLPTSSVVRQEFREIFQENSVRLSAFLREVIFRAQLLVNSYIIANCDRPVPSYIYTQNFWYSACQLIMGINISNNNPNFPQDLRDHWRAFLDNHPNALYPVRNFSGYSDALSAACVTLATTYSNNVAENFEGRLKFYISRRLTKLILGLSQKNAKAIAGDYIYELLARGDPHWPFEDELAVSDFDQAVETICGEFATLMPEWQTNAEKLSAFPGSYIPVLAYILTEYNREHEEAKQKQNAQGEQYDPKNEEAEKAKGSFKDLPRLFSLSPSPSTHWRFICVNSKTLQQLTNISHRKDYEDQLAQFYQVFDFHKLGFDSLEQLQNFGNSGRIAFKNVIFTDGYAIDFQFARARKIESVVTDASLSVEDIDGNHIYDNFAPCAIDPGINQVFTASYGCGSEPHEIRRCSTKEYYVYTGSPNRQNKMEKEKKQQGIQDIETSLESGKTAHIEAYDGYLRSIFGNMDVLFQFYGPHRAEARFRGYQGVQRAREEMVNILAFGGKKYNCSRRKRTRSNRKSRKRKRKSRKKHVNKDSEVGNPLHQSLPQPNTSAERSTLKKTKRLPHWRQKKFTVERKVPLIVFGDGMFNNRCNYKGHRKGVVNILWRSLKRREKREELLVLTIDEYLSSQVCHSCRYRSLQKLTTADCVSHHSILVCKNCKMLWDRDVLASKNLFLIAESIWSGQGRPREFARPSLAQYTAVTNTVGPSGDF

SEQ ID NO: 3734 - protein, 700 aa, Apophysomyces variabilis
MASRNKRKKKPQASTSADTQSDDDFQQLLPPKGKLNMKMQMTDSEPGPSTLPSSSMVSTQNNSSKEKPRSLKGKEKATFDSDDDFQPLPPPKRKQPLQVIPAQKYGAALAARQIMNEAQTSLINTCRSVKFVEAIEEVVKHVRDITYAGSLLANFFFVRLLSENRSIPPITHDLCYRLFSLIAVSTAAKEYEESIKNHITADFEPKTIQYLLVCMSDQDDKLFRWKGLVKDRKILAEFIYKQACGTEARWPTAIPDKKENRAYVETCVESLKNFIGVIFIDEEKLNAEPHLFFPWLFKVLRRLEQKVFITETTSQKYVSSGYVHRMILGDVNLPKRLTKSLEVAVRIAIRRRKELFLTKKFDRLPKSMRHVTIDNQALGRLMWKAGLRSTMSPIKATEVRKEYFQLFDMSKMGYKTLESLETEKILFWDKIRTDATDVEFIFKKYKTPYDPKKKPLTPSDIKGKYEDAIIWGVDPGVSSIFVAADGTGTSQHRVRSTTTEEYYSLCGFSHATRSREKYVKGDPAVKTLIDNIPSLKTTIMESLITAIRYCMQHYEHISEFFSRDRRYSKLKFKSYIQRQKGRSEVANRLLYGSKKYDQSSKQNEPKRGDSKWVPLSPNDRSDEKSKPIIVAYGNGGFSGSMKGQKAAPTKAVFKELQQQARRRKTNTSHPKSVQHVRLEICRKRTKMMHKATKARLYMLY

SEQ ID NO: 3735 - protein, 328 aa, Apophysomyces variabilis
MALNQVHDRLANARRKKYKLEQNRTVGESASKEKSAVDYSAYYETKSRFHLQLYNRYSMLGVNNVNDHDDDIDVSPTNMLQLPKPIRITAKSLDETTLARTFRKKRERRKKSNTEVLAAEEQLKEASMEKAMSVQDIIRCQEIGRSCRKTLRDFYHSNRWHKEKVIQDLYKERIYDRVAANERRKIAMEAGPHDSGRRVIPVMAIGTQGTCVGSRLKGHPKRGGKWLRARHRRRYKEIKWRTMNGSSRCVNSKCVIFKAGRTTQNRDVQAAVAIGLAAISNLFSAERITLPPFDPSHFDAGISNIADTTVQRCVQSSSESHHTGRCYC

SEQ ID NO: 3736 - protein, 246 aa, Apophysomyces variabilis
MKNIAMRSYHHPRKNFTKLAHYNASKAIMDRMKNEKPKIQQIEKDMPSARTASISQFDRYARFLLLHMSTLHQYYDKRHIDRQQASDEFAERLISSGSKYPTKNTRNQRRHHALSVTWTSRRRLDSSLENRSRTSCRRLPNTFARNIKENESRGRCKVVDVDEFKTSKICSGCGAEKLRNVKGSLGQSLHAVVHCEQCKTVWNRDCNASRNIRRIAEHMALNNNNRPSPFQRRNQLPGQTPSKTCK

SEQ ID NO: 3737 - protein, 382 aa, Apophysomyces variabilis
MFVATIDIVATILFLRLPNLTFILRLTVEDDQDIPDEDIAELSEPEVAKGENDDTEFEPHQIRQLSTAKYYTRAGFKKTMQRINTSKTPLIRRLESEIDTNRTTDIDRIFRSIVSTLDALAEVTAFYAQRDIQGLKFLNYQGRQRLDEEMVKIFINGGTKYRDPLGNADRLFRVRQQDQRVDSETLRPDGTRRWRRRRLQRQEAGEPPPPSHPPKEDKWRKSFAENDTAKVSYWCMVLRDLDGMSTRQTMWTGRQINCHTVWQRDINASRNICAMFMAMIQRDRPAIFTRPSTTTTAPRNRNVILTKERPLYLFSSIFLDSLTYRLWNPLPAHVWIWMDALTNMAFTLRREPLCHGFLQIGMENQYHNLSTSKLKLELTSGK

SEQ ID NO: 3738 - protein, 599 aa, Apophysomyces variabilis
MSLPVKPSKTKKSVIGEKLNDNHYETFTRKLPAPSVVRPEFREIFQENSVRLSAFFREVIFRAQLLVNSYIIANYLRDKWRAFLDNHPNALYPVRNFSGYSDALSAACVTLATTYSNNVAENFEDRLKFYISRRLTKLILDLSQKNAKVIAGDYIYELLARGDPHWPFEDELAVSDFDQAVETICGEFATLMPEWQTNAEKLTNISHQKDYEDQLAQFYQVFDFHKLGFDSLKQLQNFGNSGRIAFKNVIFTDGCAIDFQFARARKTESVVTDVSLSVEDIDGNHIYDNFAPCAIDPGINQVFTASYGCGSEPHEIRRCSTKEYYIYTSSPNRQNKMEKEKKQQGVQDIDTSLESGKTAHIEAYDGYLRSIFGNMDVLFQFYGPHQAEARLRGYQGVQRAREEMVNILAFGGKKYNCSRRKRTRSNRKSRKRKRKSRKKQVNKDSEVGNPLHQSLPQPNTSAERSSTLNKTKCLPHWKQKKFTIERKMPLISKRKEKREELLVLTIDDTFLRNCRFRSLHKLTTADCVSHHSILVCKNCRCYGTETSWPVKIFILECGINLVWQGRPREFAWPSLDQYTAVTNTVGPSGDFRFLRWSRR

SEQ ID NO: 3739 - protein, 1194 aa, Apophysomyces variabilis
MDRLRQALEKADRIPRGSFEEAHKKAGVPKGAIEKQIRSRLSSSHKTGEFWRQCAVDNFDDVLAVVKAEGKQNRPKKKDEDSDNLFRTCTVPLKSVLRPDLDENLKRIFMHTVESTSVQMTDYVSDLATVVRATMLKYVSVSLSLDPASGSVKAELDQTSTGFDIRTVVPKEKLRDESMLVDDYFVPVAPMLDNLSQFLDEMPGRRNNDLLSMFNENHIQFLHGLYFGTKGNVSKEKHYLWMQFHDQTLDNQPAIPDGPCRTSHFYMKQFSTNLKNMWAGSLYNRSMNHLLRVLLRVNLAPRREEKVREIREKAKLAREKEIEQQQVIKYQYRKKAIKWKLKNEKKQLRNLKKQIEQEEEDDILIRLATRAATCAEAIERLENQLLVRSESRSNPKSIKVEQMNNRASVTKEEEQQAKILISLGETHIGVFEQIEEELEEEEKEETSEPSRRKLGILQAITKALLQSDKISGHVTVEDVLATSHADDAFSPQEIDTVVNIANALRLYVIRGQIAPCIPLRLNFVVLANALLCSIGYQEFTASICPTISPASVHALPLDAVAMYEMFGSSYAQLDIYKADGSVFTNRDEAIAEKRTVIGSFFNVEAIEKTCKERGLVPRWRITVTPQKTAIIDGNVCEQRRPIESRYEARRKKYYRKKEPYVQEPSIEQQSTPELAKTLDDTKKDVKTLETLKCQHTKLVKEATKLVAGLRSSYQENQAICQKRIRDKRKADKHENVTEKEAAYQQQKLNYEALKAAKLNWSNQQMALNLVHDRLANARRKKYKLEQNRTVGESASKEKSPAGRKERKSKEEEDEKMEEADGDEEDTKYKKEKEKKKDKHNDDNDDDDDDEEEEEEEDSLCRPQSGRCPGCEDSVGRLDLGPLLEDQNNILTFSGTDYGLQVLSTTVPITRQRADFHLQLYNRYSMLGVNNVNDHDDDIDVSPTNMLQLPKPIRITAKSLDEKTLARTFRKKRERRKKSNTEVLAAEEQLKEASMEKAMSVQDIIRCQKIGRSCRKTLRDFYHSNRWHKEKVIQDLYKERIYDRVAANERRKIAMEAGPHDSGRRVIPVMAIGTQGTCVGSRLKGHPKRGGKWLRARHRRRYKEIKWRTMNGSSRCVNSKCVTFKAGRTTQNRDVQAAVAIGLAATSNLFSAERITLPPFDPSHFDAGISNIADTTVQRCVQSSSESHHTGRCYC

SEQ ID NO: 3740 - protein, 425 aa, Apophysomyces variabilis
MIVIPSAVKEYEEAIRNHLTANFEPKTVQYLLVRMSDDKDEAFRWKFTVAERRLLANFVYKQACGTEAPWPTSITDNRHYRDYVKSCVKFLQQSIGIAEIDETKLIAEPHLFLPWFFQVLKPFEQNYLLPSPQLKSTSPQGSRQRETAKATREKTRSECYQMRYITMDNQALGRLMCKSGLRDTISSVKPDEAREVYFNLFNMSEIGYWTIEDLETEKVLFWDKIRTDGTDVDLFLKNMKGKFDDALIWGFDPGVGSGFVAADGTHDSRHRVRSTSTEEYYFLCGFNHASRVREKYNKQEPAIKHLIDKTPSLKTSDLEKLNISTRYCIQHYDTISEFFSRNQRLLLLCSSLTNILRLKYIQSIRSETYRMQKKEKMREARKARKIRTVLTCSNKSCTTMFWNRDSMAASNILHVFLHMRGYANR

SEQ ID NO: 3741 - protein, 830 aa, Apophysomyces variabilis
MWNGATVPYITQRLILLLLRFALAPQRERQNYNLRKRKQERKDKHDMCENKSSVATLDWRIKYQTRRLRKLENRVSADDPRVRKLSAIIATLKSTGSNLLAQKSNQKELASNPSREREDDDMDKVQLNDEDAQWERNGEEDEEYQKALEDVSVDNITVRKLQKEFSTAELNLKKAEAVIGVYSFIKPFFLCPTGELAVDRHPLLNAPLVLLANAIFTITDNKKFTRSIYPAIRPSAIYSLVLNPTTTFEILCYTRDDIDGFDVVGPNGKTMTSCPDATHNLKYILGAFFNVERIDRICHKHGLKFDNVLTISSYGSTSIQGTVLKSRKVARSRYEKRKKKHARPSATILPKAQESDTVTAIGKDIVKTTGKVKQLENSLRDRTETICLLTEEINAIKDGRSNTSNAEDLIDTIAFRNGLKNERKQENKKLLLERKRLQNFRHDKYLAVQAIVDEEIEKSDQKLSKGRKRKRKTKHKDLRKVTANSFKCEDDVLKMNITGMTEDPSTGITFSGTDYGVITTSESVSLPIERFAYHLKLDNRFSALETQDDDTEDDLASDFQKIPKTFKITAKQIDDLSFTRRVRRQREYRKRATEEGKKVKAIEKKLSKNNVGNAVDIDSLHNYRKIAIDNRDILRKFNSEKKSVKKSKRTQDIYTQKAYATVASNERNFLNGSGKKTNVLLMMTGSAGTGVCSPIRGHYRRGGKKLREQHLQQTSVGMTNEFRSSQLCPFRYQVLSHPNKKKVGYIKKNFGTVICTNSECISVKKGYGSRGRDQNAALNIALAGTSALFSKRHEPFPEFNPKKASKYLLDNNLLASLMSIPEGCGVDARA

SEQ ID NO: 3742 - protein, 567 aa, Apophysomyces variabilis
MKNLEKINERYTRKLPLDSIIRPEYREEFKRKLTNLFGFLREVVFRAQIFVNGYIISNADQEINAYVYTQSFWYPIFQLVLDKKVSKKNSNMPSDLLGYWAQFRAAYPSVIFSPQGFSGYSDALSAACKILATCYTNNFVETFENRVVQYSIRKLKAAVPELPNGRINDLAREEVNSLFEELSSAIPVPATAETMSASPRRFVSALRHILSTYDEEYKNSKGSDYEELLRRFSLSPMPPTKWRFATINAKVLSCLIEFTSEGGFEQNTALFHTVFDFTKLGYRSVEELKDSSVDRGVIFTNQILSDGFARIPADRKCLRPHMGAATIRMKFTDAAEKKEAGIEAIETDLETGKTQSLEVYDNYVRCTFQHMNALFAFYGPTKAEGRFRNYQGRQPAPEEIVNILTNGGKKYNRNRQNEIASYVAKIKKTKEEKASKPGCNCDVWQRYCETQGHRSGVVGKLCKHFKRKERREGCLLSRWMSTLHRSCATIATRKTWKLTTADGISCHDILVCKHCGVLWQRDINACKNISSIALSIWVGEGRPQRFSRLPAPNNIPESNAGLPLGEV

SEQ ID NO: 3743 - protein, 972 aa, Apophysomyces variabilis
MLPDLNFVVNPGLSMGNAISRSPTKNYEQYMQTVIAGARGRPISKENRSKALQWLQARGLQTVSKLFNTSPLEAALSVAVVRCLGDKQHAVSLRLPGNQTIPANGLLRLIAIAKMYNIRVYLFSTQSKPKVTGNNRSVYNMSLLHEVDSHTGTSRWVPLYIARFISPKLPVPETTHEKSPFVSPAATKKNAVGERRKKKQRAPLGATEEVIKDELRKEINKRIHLEFSRITRNKNPTRAALEKFKEKFMNRNKTPKEKYGTKASPSALEQHFKGPDKPLKKITDHEIQAASIKDSKRKASDIHGDDSEGNNRSGDEPSEDEEQSDDKDDNYQEYIRVATTTLRKLVRPDIGLDTVLRGDVYQFTGYDNYSTEINLPVVFPADYDFGNHNAKHNGVLSSLVDPNDDAVASQFQADSLRALDTAANNLYSGILYLRSLTNVIHLLLRVNLAPRRMFKYMQLVKKKAKEKKDHQEQRQDLRSNKVYMNGRPDNVVEAIQRKVVSNLPRKDRTEDQKKSNEEEIKSQKADDEYEAFRLDQAEDDLVNDSEDDEDMAATTSSQAPITSKETSACTIRTLVAIVRMLVESPLIKRTISAKDVADAVHTGTILTIAEQQVAAKVANFLKPYTPRRNEPDEPPAKHILTVLSIAALSNVVSTILGIQDHVNKLTIETSNKWALLMKADGIYKIIIDAFDTFTNRQGEFITSGLQAKTEKETVFKAFFQMDKIHRMMNRRHLFFRWRLVFVNEWTRKKQKRSSQATSSAKAKITEGYMPQMLSVVKPLFEKNSIPVCGVGPGIRTTGVSTSTTSARTIQRICDFTSNTTTELRHDIYNTLSLQASAINYHSRSNRHRLRRERAKNAEKEGTEAENRRIEREKRTTEVFTQKAYHKYADVECMHFSQDMISEKAVHFYGHWQPTNFYIRKHTRRGLKRLRGVQRRKGLVIIVKEYNTSKTCHWCLKPLQLQNTREGRQGQKM

SEQ ID NO: 3744 - protein, 495 aa, Apophysomyces variabilis
MLATTTQFSSRPTDSVSAACVTLAIMYSNNVVENFESRLKFYISRRLTKLILGLSQENAKAIAGDYIYGPLARGDPHWPFEDELAVSDFNQTVETICGEFAILMPEWQTNSEKLSASPGSYIPVLTYILNKYNQEHEEAKQKQNASKNEEAEKAKDSFNDLPRWFSLSPSPSTHWIFICVNFKTPQQLTNISHRKDYEDKLAQFYQLNLSKMFVSLEQLQNFGNSGRIAFKNVIFTDGYAIDFQFARARKIDSVVTDVSLSVEDIDGSHISDNFAPCAIDPGINQVFTASYGCGSEPHEIRRCSTKEYYMYTDIETSLESGKTAHIEAYDGYLRSIFGRMDVLFQFYGPHRAEARFREYQGVQRAREEMVNILAFGGKNLPQPNTSAERSALNKTKRLPHWRQKKFTVERKVPLIVFGDGMFNNRCKYKGHRKGVVNILCKNCKMLWDRYVLASKNLFWIAESIWSGRGRPREFARPSLDQYTAVTNTVGPSGDN

SEQ ID NO: 3745 - protein, 984 aa, Apophysomyces variabilis
MLQAVFEWCCSKLTALIPRSYEWNWQGIVCLCKIRKYFQQEAERLKREEVFCKDCGQNGHPNKRYKACPLNARHGKKPVGVKRKLNATEEAEFSAAKKRGRQLKAEETSNPNKSNKPCPSCGGIDHSKSSSKNCRKPSKTKKSVIAEKLNDNHYETFTRKLPTSSVVRQEFREIFQENSVRLSAFLREVIFRAQLLVNSYIIANCDRPVPSYIYTQNFWYSACQLIMGINISNNNPNFPQDLHDHWRAFLDNHPNALYPVRNFSGYSDALSAACVTLATTYSNNVAENFEGRLKFYISRRLTKLILGLSQKNAKAIAGDYIYELLARGDPHWPFEDELAVSDFDQAVETICGEFATLMPEWQTNAEKLSAFPGSYIPVLAYILTEYNREHEEAKQKQNAQGEQYDPKNEEAEKAKGSFKDLPRLFSLSPSPSTRWRFICVNSKTLQQLTNISHRKDYEDQLAQFYQVFDFHKLGFDSLEQLQNFGNSGRIAFKNVIFTDDYAIDFQFARARKIESVVTDASLSVEDIDGNHIYDNFAPCAIDPGINQVFTASYGCGSEPHEIRRCSTKEYYVYTGSPNRQNKMEKEKKQQGIQDIETSLESGKTAHIEAYDGYLRSIFGNMDVLFQFYGPHRAEARFRGYQGVQRAREEMVNILAFGGKKYNCSRRKRTRSNRKSRKRKRKSRKKHVNKDSEVGNPLHQSLPQPNTSAERSTLKKTKRLPHWRQKKFTVERKVPLIVFGDGMFNNRCNYKGHRKGVVNILWRSLKRREKREELLVLTIDEYLSSQVCHSCRYRSLQKLTTADCVSHHSILVCKNCKMLWDRDVLASKNLFLIAESIWSGQGRPREFARPSLDQYTAVTNTVVTPTVHTILLVQPLSQPSSRTYYDFEKISEAMDHIAGLFEQQLQRENPRLGQVQYKMDELFRYIDSYKEFVALVFDPATKNYQPHDKQWIKDRLISHFSRHTNQPSQPSYRQPQNRPYGNRRW

SEQ ID NO: 3746 - protein, 242 aa, Apophysomyces variabilis
MDIRGMTEDPRTGITFSGTNYGVVTMSESVSLPIERFAYHLKLHNRFSALETQDDDTEDDLASDFQKIPKTFKITAKQIDDLSFTRRVRRQREYRKRATEEGKKIAIDNRDILRKFYSEKKSVKKSKRTQDIYTQKAYATVASNERNFLNGSGKKTNILLMMTGSARTGVCSPIRGHYRRGGKKLREQHLQQTSVGIINEFRSSQLCPYGYQLLSHPEQEKRWQYQEKLWHSHLYKFPNALL

SEQ ID NO: 3747 - protein, 1260 aa, Apophysomyces variabilis
MDRLRQALEKADRIPRGSFEEADKKAGVPKGTIEKQIRSRLSSSHKTGEFWRQCAVDNFDDVLAVVKAEGKQNRPKKKDEDSDNLFRTCTVPLKSVLRPDLDENLKRIFMHTVESTSVQMTDYVSDLATVVRATMLKYVSVSLSLDPASGSVKAELDQTSTGFDIRTVVPKEKLRDESMLVDDYFVPVARMPDNLSQFLDEMPGRRNNDLLSMFNENHIQFLHGLYFGTKGNVSKEKHYLWMQFHDQTLDNQPAIPDGLCRTSHFYMKQFSTNLKNMWAGSLYNRSMNHLLRVLLRVNLAPRREEKVREIREKAKLAREKEIEQQQVIKYQYRKKAIKRKLKNEKKQLRNLKKQIEQEEEDDILVRLATRAATCAEAIERLENQLLARSESRSNPKSIKVEQMNNRASVTKEEEQQAKILISLGETHIGVFEQIEEELEEEEKEETSEPSRRKLGILQAITKALLQSDKISGHVTVEDVLATSHADDAFSPQEIDTVVNIANALRPYVIRGQIAPCIPLRLNFVVLANALLCSIGYQEFTASICPTISPASVHALPLDAVAMYEMFGSSYAQLDIYKADGSVFTNRDEAIAEKRTVIGSFFNVEAIEKTCKERGLVPRWRITVTPQKTAIIDGNVCEQRRPIESRYEARRKKYYRKKEPYVQEPSIEQQSTPELAKTLDDTKKDVKTLETLKCQHTKLVKEATKLVAGLRSSYQENQAICQKRIRDKRKADKHENVTEKEAAYQQQKLSYEALKAAKLNWSNQQMALNQVHDRLANARRKKYKLEQNRTVGESASKEKSGRRPGCEDSVGRLDLGPLLEDQNNVLTFSGTDYGLQVLSTTVPITRQRADFHLQLYNRYSMLGVNNVNDHDDDIDVSPTNMLQLPKPIRITAKSLDEKTLARTFRKKRERRKKSNTEVLAAEEQLKEASMEKAMSVQDIIRCQKIGRSCRKTLRDFYHSNRWHKEKVIQDLYKERIYDRVAANERRKIAMEAGPHDSGRRVIPVMAIGTQGTCVGSRLKGHPKRGGKWLRARHRRRYKEIKWRTMNGSSRCVNSKCVTFKAGRTTQNRDVQAAVAIGLAAISNLFSAERITLPPFDPSHFDAGISNIADTTVQRCVQSSSESHHTGRSAQKVIKTYLQHGLLQTLYSYGAKLPKFSKQGLDMHELIVSINTSVTQQSTWEVFKALPLVHKLLLDALDQNLDDILRSLCMQSFFLPCLRHGHFTMCSFILPCSGPFEADMKSRFANKDTIARKIHVGFSHFS

SEQ ID NO: 3748 - protein, 653 aa, Apophysomyces variabilis
MELQKQLQVEERLKKCITLKVCLITGTKRTRQPEVQSVALKKAKKTARASKQASSSNTAFIANPCPACGSTQHRSTRAKSCPRQTRSTEEILEDQLGKGFETFTRKAPLHFVVVEAHRDQLQRKVQELSKYTREVIARTQLIVNQYILDHQVIPPICFTQNFFYSVTQLVLNKSMTAKNDKMPTDLSSSWRAFRDKHPQMQQAPNTQLRSSDLLSEACVLLATCYSNNIVENFETRVRSFVEHRLSVAFPNMNKTEIQNIVSEYAFERIAGGSPQWPNLIEPDLPVVAIVDKVCDDLEALTPKPATQQAISASSGAYIPTLKYILSSYEEDCKWRFVSINAKLLASLLPIREPTQPSEYPRAFFEALDLTRFGFNSKSSVRKKQKEKVRQRKLTSRTLSLMKSSIDSNHGSGSQRHQVRRVSTKEYYAMTGSTWRAKQLEKQKDAAGITRIETGLESCNTASSEQHHQFVECFAQNFPILTGFYGPGMAEKRFHNYQGVQRARKELVNVPQESGIRSTQNKPHPSTKKWHPKAFQASKKIPLSVFGSAMFGTSGHASRKGKRAALVNTFDEFYTSQVCNSCLQRGLEKVTTSDSVSHHGVVVCKHCRTLWQRDINSAKNMFYITNSVWRGQGRPIEFCRPAKNDVATTNVVSS

SEQ ID NO: 3749 - protein, 1193 aa, Apophysomyces variabilis
MDRLRQALEKADRIPRGSFEEADKKAGVPKGTIEKQIRSRLSSSHKTGEFWRQCAVDNFDDVLAVVKAEGKQNRPKKKDEDSDNLFRTCTVPLKSVLRPDLDENLKRIFMHTVESTSVQMTDYVSDLATVVRATMLKYVSVSLSLDPASGSVKAELDQTSTGFDIRTVVPKEKLRDESMLVDDYFVPVAPMPDNLSQFLDEMPGRRNNDLLSMFNENHIQFLHGLYFGTKGNVSKEKHYLWMQFHDQTLDNQPVIPDGLCRTSHFYMKQFSTNLKNMWAGSLYNRSMNHLLRVLLRVNLAPRREEKVREIREKAKLAREKEIEQQQVIKYQYRKKAIKRKLKNEKKQLRNLKKQIEQEEEDDILVRLATRAATCAEAIERLENQLLARSESRSNPKSIKVEQMNNRASVTKEEEQQAKILISLGETHIGVFEQIEEELEEEEKEETSEPSRRKLGILQAITKALLQSDKISGHVTVEDVLATSHADDAFSPQEIDTVVNIANALRPYVIRGQIAPCIPLRLNFVVLANALLCSIGYQEFTASICPTISPASVHALPLDAVAMYEMFGSSYAQLDIYKADGSVFTNRDEAIAEKRTVIGSFFNVEAIEKTCKERGLVPRWRITVTPQKTAIIDGNVCEQRRPIESRYEARRKKYYRKKEPYVQEPSIEQQSTPELAKTLDDTKKDVKTLETLKCQHTKLVKEATKLVAGLRSSYQENQAICQKRIRDKRKADKHENVTEKEAAYQQQKLSYEALKAAKLNWSNQQMALNQVHDRLANARRKKYKLEQLVKAHQKKKGKSPAGRKERKSKGEEDEKMEEADGDEEDTKYKKEKEKKKDKHNDNNDEENEEEDEEEEEDSLCRPQSGRRPGCEDSVGRLDLGPLLEDQNNVLTFSGTDYGLQVLSTTVPITRQRADFHLQLYNRYSMLGVNNVNDHDDDIDVSPTDMLQLPKPIRITAKSLDEKTLARTFRKKRERRKKSNTEVLAAEEQLKEASMEKAMSVQDIIRCQKIGRSCRKTLRDFYHSNRWHKEKVIQDLYKERIYDRVAANERRKIAMEAGPHDSGRRVIPVMAIGTQGTCVGSRLKGHPKRGGKWLRARHRRRYKEIKWRTMNGSSRCVNSKCVTFKAGRTTQNRDVQAAVAIGLAAISNLFSAERITLPPFDPSHFDAGISNIADTTVQRCVQSSSESHHTGRCYC

SEQ ID NO: 3750 - protein, 354 aa, Apophysomyces variabilis
MANKKREAKHQAKKEAQQKKTEGNEVVCGSCGKTGHNRASNAASENHKPRRKTLTQLKRTSIVKTCLQNTCRNPDFVEAIRTANKELPVISHNLYKTDGIDAEFIFKRPKRESSSKLLTPADLKDMAKDALIWGVDPGVTDTFVAVEGCGKESHQIRKTSTADSNPQIKELIDRIPSMKSAHRTEVITSLRYRFQRHQEITSFYYLDERLIRKQKGVTEIAKRLLDGSKKYAVQQVDSDTPKRSSDKKRKQRKAPARVIMVDEYLTSQICPVCSKRELKKQQERPGNHEKAGAALHAILRSNSCAIVWNHDVLGAKNILAVFKYTVTSNNERPSPFERAAKSKTSPEMQEPDLP

SEQ ID NO: 3751 - protein, 730 aa, Apophysomyces variabilis
MLQAVFEWCCSKLTALIPRSYEWNWQGIVCLCKIRKYFQQEAERLKREEGEVIFRAQLLVNSYIIANCDRPVPSYIYTQNFWYSACQLIMGINISNNNPNFPQDLRDHWRAFLDNHPNALYPVRNFSGYSDALSAACVTLATTYSNNVAENFEGRLKFYISRRLTKLILGLSQKNAKAIAGDYIYELLARGDPHWPFEDELAVSDFDQAVETICGEFATLMPEWQTNAEKLSAFPGSYIPVLAYILTEYNREHEEAKQKQNAQGEQYDPKNEEAEKAKGSFKDLPRLFSLSPSPSTHWRFICVNSKTLQQLTNISHRKDYEDQLAQFYQVFDFHKLGFDSLEQLQNFGNSGRIAFKNVIFTDGYAIDFQFARARKIESVVTDASLSVEDIDGNHIYDNFAPCAIDPGINQVFTASYGCGSEPHEIRRCSTKEYYVYTGSPNRQNKMEKEKKQQGIQDIETSLESGKTAHIEAYDGYLRSIFGNMDVLFQFYGPHRAEARFRGYQGVQRAREEMVNILAFGGKKYNCSRRKRTRSNRKSRKRKRKSRKKHVNKDSEVGNPLHQSLPQPNTSAERSTLKKTKRLPHWRQKKFTVERKVPLIVFGDGMFNNRCNYKGHRKGVVNILWRSLKRREKREELLVLTIDEYLSSQVCHSCRCRSLQKLTTADCVSHHSILVCKNCKMLWDRDVLASKNLFLIAESIWSGQGRPREFARPSLDQYTAVTNTVGPSGDF

SEQ ID NO: 3752 - protein, 539 aa, Apophysomyces variabilis
MWVWERALRSSMEHPVFNMCCCQGKIRLPPLSPPPEPLLRLPTANTEAGKQFRLNIRAYNNVFAFSSMGVQLDESIVNATKLNAEPHLFLRWFFQVLKRLEQKIFIAELTAQKYVSPGYIHRMVDKVLDKEKLPKRLVKSLEVNVRIAIRKREKLSLAKKFARISETALSKLQEFIKETGDAIDAEIFKPEKHTDPRGKRRFTMLPVYSTQMRHITMDNQALGRLMCKSGLRDTLAPVKPDEAREVYFKLFDMSKIGYRTIEDLETEKVLFCVFVAADGTHDSRHRVRSTSTEEYYSLCGFNDASRFREKYNKQEPAIKDLIDKTPSLKTSDLEKLIMAIRYCIQHYDTISEFLAEIKGVADFLCYNSNIITSPRYSKLRFKSKENTCKSSDSKWVPLSANDRPEEKEKPIIIAYGNGAFSGSMKGQKAAPSKAILKELQQQARQRKAPTFVFLIDEYLTSQICPVCQKRNLQNAKEGKDARGQEASKTHAVLTCSNKSCTAMFWNRDSMAASNILHLFLHMRDYANGRPDPFIKVAST

SEQ ID NO: 3753 - protein, 597 aa, Apophysomyces variabilis
MDNLSFDINSLIWAFFMLSLNAFSAKEVIGTETRRDRLSPRLYEDRISYLKPTIARQLVCGYCGRSGHRDRRSYKCPLKEKKVGVKRKHQSDVQAESSKMAKEHGRQRKQQTAAKTPSTPRSCPGCGSTEHRNTRAKSCTVHKQSTNQLLEAALGKNPEFYTRKITFDAVVCEEYRDQVRTKIEELSSYLRLTLSKKEAMDMASKYVFERIGGGTSEWPDGIEPTLPFVALTDGLCDDLEALVPKPASQETISASPLFLFASTKCFPANVNDLRGSTVPRLFSISPKPSAQWRFVSINAELMASLASLRRPHQPSEYFTVFFQVLDLSRFGFNSLDDFTQNVNQRFACRILTDGFAVNLLFARRAREGTPDTELELEDFSLDEVNRYFDPWAVDPGHNQVFIAVDGSGSKSHQVRRVSNKEYYAMTGSERRAKTLQKDKDTHDITTIETNMITCKTALSQRHHEFVACFLEKFPSLARFYGPCMAKIRFRNYQGTQRAPEKLANILVKGDEFYTSQVSAPYVMFEFMERYIQVCHACMRRDLSKVITADGISHHGISVCKNCHILWQRDVNSAKSMYHIADSVWRGLGRPEKFRRPQ

SEQ ID NO: 3754 - protein, 447 aa, Apophysomyces variabilis
MSISPQLVLDKKVSNKNSNMPSDLLGYWAQFRAAYPSVIFSPQGFSGYSDALSAACKTLATCYINNIVETFENRVVQYSILKLKAAVPELPNGHIKDLAREYVYERICRGDPLWPDAVPLVSTGINSAVNSICEELSSVIPVPATAETMSAFPGRFVPALRHTLSTYDEEYKNSKGYRSFEELKNLSVDRGVIFTNQILSDGFAVDLQFARKSGKKERATVNAELTVTDFTEEEITDYFQPCAVDPGRSQVFMAAYGCGNSPHEIRRCSTREYYTYTASPLRQRIIQAEKKEAGIEAIKTDLETGKTQSREIYDSYVRCTFQHMNALFTFYGQTKAEGRFPNFQGHQRASEEMVNILINGEKKRACPPESAVRSTLCRNKGFRKWKGAGYQESEKMLFIIFGDGMFGKDTVKLKGHQSGVVGKLWKHIRRRERRGELLAVKIDEYLT

SEQ ID NO: 3755 - protein, 990 aa, Apophysomyces variabilis
MRDDLPADDRQTFQEKMAATAIQVTDYAADMMAVVNALMLEIANKGIIVKKTGEVEISLNQTSLYPKVDLFLPKYALRHPDQGRCNNSTIPVAPLPRNLDKLGNNGDFHKMFTYEHLQFLHTRLFSQRLTATSAARHPVWNKLLPSHQPGFSFPAGLSLTLTEKLRQLATNIQNIWHGHIYSRSLDRLILVYLRTHLAPKREAKYKEMADRRAEERKEKKESPSLKKRSGTRQLLRRENRYLNKCQQKVQTAINHEDKRKWQLRAQQSEGRLNVMYKRHIDSRPARSQSAAETVEASTHQAEIVSYDPQISVLLKNHLSANEVTEFLLDNESDDNDEDASVKEEKEDKEPPDVTARRIRVLKRIAKDHIIAGIEHKELKKFIRDAYEGQDSNREVDAVYNLCSVIRAFVPPKETQPCVLTHIPVVLLANIVQRVAGYAEFTMKICPHHWRSRYTLNGSDMQSISSADMAVHRKSETLGSFLDTEKMQDICSSYGLDFDNRIIVSNHGTIHLQGVLQESVRTAISYYDIRKKKARNQKEKAATKPVSKETKPKTIPTAIQRELETYDRKIKDLEKQLRSENSSLGRTVKQLQEFKERLFSASNQDNRRLSSELKALKKARAANQSQVNSTRLTLKDTCNQRYHLWEKAKMDPKNKKPKKEIRYNPPNSQYPAYEEDEEYIDLQSFIHSMEASGKEVSFGGTDYGLVTMSITVSLSNQQCLQMIETYNRSSSLSKKTEHGQTMKDPVEQMMNTVSPKCLRTTAQELNQSGLVRKYQKKRQRQKALKPDVKNAETKLSKNSATLATSSSEIWRCHQVNAWWQWRVARSLENFIIQRELERKETTINRFRSIIYNKFALIGRRFVGGPDKHSTVICIGKLGTGARPRIGGYSRRGGAQIRKRHRSHTTVVITDEFRISQTCSVCFQPVVRPKGRRYIDGKWKTFSLNGGSLCMNPECASFATGSNTKNREVEAATCIVIAVASRWLTGSRLPPR

SEQ ID NO: 3756 - protein, 389 aa, Apophysomyces variabilis
MKAICSDYVAEVIVHGEPHWPTASVSIVYIRAVNAAKTVLDELSHHIHGPCRPAYLSALPGSYIPVLRFILQSFTLAHRESEAASTLIARGPSNNHESTDKYEANFNLFNQCFDLEKYGYGRLQDLNTDEVGQFYRPVAVDPGSGHLLTASYSHGADQHEIRKRSTAEYYSVTGSGRRNNALYKDKQAAGIKYIERKFPTGKFYHSGRGHSRFHNYQGRQREREEIANIMVHGGKKNREREKEKRARERQDEASNATQGVEVLSRIPESAVRSTTSNRRLPRWKKTKVKVDINGKMPLVVFGSVMFGKRQMNHTEISNSCHSRTLTKFKTLDGVTHQCPGLVVYWKPTRCIQSTRARRNSNQYHCCERGFPNWDLDCYDVQIDKPFITF

SEQ ID NO: 3757 - protein, 1153 aa, Apophysomyces variabilis
MNRLRQALEKADRIPRGSFEEADKKAGVPKGTIEKQIRSRLSSSHKTGEFWRQCAVYNFDDVLAVVKAEGKQNRPKKKDEDSDNLFRTCTVPLKSVLRPDLDENLKRIFMHTVESTSVQMTDYVSDLATVVRATMLKYVSVSLSLDPASGSVKAELDQTSTGFDIRTVVPKEKLRDESMLVDDYFVPVAPMPDNLSQFLDEMPGRRNNDLLSMFNENHIQFLHGLYFGTKGNVSKEKHYLWMQFHDQTLDNQPVIPDGLCRTSHFYMKQFSTNLKNMWAGSLYNRSMNHLLRVLLRVNLAPRREEKQLRNLKKQIEQEEEDDILVRLATRAATCAEAIERLENQLLARSESRSNPKSIKVEQMNNRASVTKEEEQQAKILISLGETHIGVFEQIEEELEEEEKEETSEPSRRKLGILQAITKALLQSDKISGHVTVEDVLATSHADDAFSPQEIDTVVNIANALRPYVIRGQIAPCIPLRLNFVVLANALLCSIGYQEFTASICPTISPASVHALPLDAVAMYEMFGSSYAQLDIYKADGSVFTNRDEAIAEKRTVIGSFFNVEAIEKTCKERGLVPRWRITVTPQKTAIIDGNVCEQRRPIESRYEARRKKYYRKKEPYVQEPSIEQQSTPELAKTLDDTKKDVKTLETLKCQHTKLVKEATKLVAGLRSSYQENQAICQKRIRDKRKADKHEKVTEKEAAYQQQKLSYEALKAAKLNWSNQQMALNQVHDRLANARRKKYKLEQLVKAHQKKKGKSPAGRKERKSKGGEDEKMEEADGDEEDTKYKKEKEKKKDKHNDNNDEENEEEDEEEEEDSLCRPQSGRRPGCEDSVGRLDLGPLLEDQNNVLTFSGTDYGLQVLSTTVPITRQRADFHLQLYNRYSMLGVNNVNDHDDDIDVSPTNMLQLPKPIRITAKSLDEKTLARTFRKKRERRKKSNTEVLAAEEQLKEASMEKAMSVQDIIRCQKIGRSCRKTLRDFYHSNRWHKEKVIQDLYKERIYDRVAANERRKIAMEAGPHDSGRRVIPVMAIGTQGTCVGSRLKGHPKRGGKWLRARHRRRYKEIKWRTMNGSSRCVNSKCVTFKAGRTTQNRDVQAAVAIGLAAISNLFSAERITLPPFDPSHFDAGISNIADTTVQRCVQSSSESHHTGRCYC

SEQ ID NO: 3758 - protein, 1289 aa, Apophysomyces variabilis
MFRLSAMQVPHPQIRENKRKRKRVIQSNISLDKAIEALHDVFQNQLVTIISKELEDKPRKNTAKKARFQSEVEKQAKTNKILQELRTRLEKADRVPRTSLEQADDSINVTRGTIRRTLCFHYPEPASIGKLWRDYAAAHFNDAVAEARARLEEHGEVEEAGSSKEVTVNDDSKEEKEIIRTCSVRLSKILREDLDNQVKQTFLETIAITSEQATNYASELGTAVHATMLKYASGSVVLDAESKQAHYQQDGKTFNVLDVIHEEWIRHPELLNSELAIAVAPMPDNIKNYVKALSKKHNDEFLNLFTEAHLQFLHSDYFGRQSYKAQGKSFWSSLQHQGLKDLPKPPAGLSTVMHFQLKQYATDLQNMWAGGLFHKSINHLLRILLRINLASEREKKIQEITEKKLQEKEKQREESSRTMRRKKEWRRRKIKGRLKQERKSLRRLEKRLGIEMDGNQRANLLQRKKSCVEAIRRLEKQAKEKYRPKKADNQPHQKDEEARGDMDKLAISADISVMDDEEIEETIETAIEEAQDELEEVEIKTLKKEPSRRRLIRIQAITKKLLLSTDIDGNVQASDVSDIWNDNDELQKVEIDIVVKLANALRPYVPKGRLSSAISLRLRFVLLSNAILHATGYSKFTANICPTISPASIHALPLDAASMYEMFGSNSAKFNLYKEDGSTIDNIREARTNKSAVIGSFFDQEKVKHICNTRGLEPRWRITITPHQMAVIDGDVKKGRVIDTSHYEERKKKSKGKRADSASSQFEDKSGLDIANITCSLEDAKQRVKALESAEKQIKNALRQREEVVESRMESYRRSKDVARRKVRDKRKSEKFDIYDSRAKQKQTDIYKDLKAAKLERAKSQSELSKIRSQLADQRRLRYIYQKQLDILKKQQTNKETKPKDDEQEQETKLCKVASWNRPGCEANTEFLDISELHQEVKQDPKKTITFGGTDYGLRTLATTVPVTMERARLHFDLYNRQFGDGQTPVSIPKEMSTLPKPMRITAGYLEEKTLCRSFRKKRERRKKNNPAVISAEKTLSKRSSASATTVEQVLESQAVKRNCRRELRAFYHSNRAEHEKRTQKLYTDRIYDQVAAQERKFIKAAATTQTDGRQKALPIMAIGTQGTGVGLRLKGHLKRGGKWLRKRHRRYVPVSMTNEHRSSQLCVYCFERVERAKARRRKSRQWKTVRVNGASQCVNPCCPAYQSGHATQNRDVQAAVAIGLASASNILSANRSTLTPFDPSIFSAGKPFVPGATNFWCVNSSRKLCEELREPGPVAMTGVIRTYASEEF

SEQ ID NO: 3759 - protein, 568 aa, Apophysomyces variabilis
MSTEPAPWKETWKPSKTKKSVIAEKLNDNHYETFTRKLPTSSVVRQEFREIFQENSVRLSAFLREVIFRAQLLVNSYIIANCDRPVPSYIYTQNFWYSACQLIMGINISNNNPNFPQDLRDHWRAFLDNHPNALYPVTNFSGYSDALFATCVTLATRYSDNVAETFESRLKFYISRRLTKLIPGLSQKNAKAIEGDYIYELLARGDPHWPFEDELAFSDFDQAVETICGELAKLMPEWQTNAEKLPASPGSYIPLTNISHQKDYEDQLAQFYQVFDFHKLGSDSLEQLQNFDNSGQIAFRNVIFTDGYATDFQFARARKTESVVTDVSLSVEDIDGSHIYDNFAPCAIDPDINQVFTASYGCGSEPHEIRRCSTKEYYVYTGSPNRQNKMEKEKKQQGIQDIEISLESGKTARIEAYDVYLRSIFGNMDVLFQFYGPHRVEARFRGYQGLPKSKRGNGQYTSIWCLPQPNTSAERSTLNRTKRLPHWRQKKFTVKRKVPLIVFGDGTFNNRCNYKGHRKGVVDILWRSLKRREKREELLVLTIDKYLSLQLQMQVPAKAYNSRLRFSP

SEQ ID NO: 3760 - protein, 798 aa, Apophysomyces variabilis
MKEYWQYKRQKNEITDLDENNRPSIVPQDLAKLAGISKGKGKEKANDTLEGDFQDSFSPKQGTWADEQLQTLKIVPPTEATLDAGYDPGPSTGKSQKHWSRLRRLMLSGMRNLMQKLNYRKTSKKRELHQAVLYGAVLVVEQTINGGQRTSVIKTSLANTFRSAEFVRSIKDVVKHIRDVTYVGSLFANFFFVQLLSENQNIPPITHDLCYSIFPMVAGEGEYANESLQEAYLRFKVSVPEYKETKFRSRGYMTVISSAAKEYEEVIRNHLTANFEPKTIQYFLVRMSDDKDEAFRWKSTVAGRRLLANFVYKKACGTEAPWPKSITDNRHNRDYVKSCVEFLQQSIGITEIDETKPNAEPHFFLPWFFQVLKRLEQKIFIAEPTAQKYVSPGYIHRMVDKVLDKEKLPKRLVKSFEVNVRIAIRKREKLSLAKKFARIWETALSELQEFIKETGDAIDAGIFKPEKHTDPWGMRRFTMLPVYSTQMRHITMDNQALGRLMCKSGLRDTLAPVKPDEAREVYFKLFDMSKIGYRTIEDLETEKVLFWDKIRTDGTDVEFILKKYKAPYDPKKKPLTPSDMQGKFDDALIWEVDPGVANVFVAADGTHDSRHRVRSTSTEEYYSLCGFNHASRVGEKYNKSDSKENTCKSSDSKWVPLSANDRPEEKEKPIIIAYGNGAFSGSMKGRKAAPTKAILKELQQQARQRKAPTFVFLIDEYLTSQICPVCQKRNLQNAKEGKDARGQEGSKIHAVLTCSNKSCTAMFWNRDSMAASNILHVFLHMRDYADRRPGPFIRLANT

SEQ ID NO: 3761 - protein, 1090 aa, Apophysomyces variabilis
MTVISSAAKEYEEAIRNHLTANFEPKIIQYLLVRMSDDKDEAFRWKSIVAERILLANFVNKQVCGTEATWPKSIADNRHNRDYVKSCVEFLQQSIGITEIDETKLNAEPHLFLPWLFQVFKRLEQKIFAAPTALKYVSPGYIHRMVDKVLDKEKLPKRLVKSLEVNDRIAIRKREKLSLAKKFAHLSETALSKLQEFNKEIGVAIDAGTFKPEKYTDPRGMRRCTMLPVYGTQRRHITMDNQPLGRLMCKSGQRDTMSPVKPDEAREVYFNLFDMPKIGYRTIEDLETEKVLFWDRIGTNGIDIEFIFKKYKVPYDPKKKPLAPSDMQGKFDDALIWEVDPEVANVFVAADGTHDSRHRVRSTSTEEYYSLCGFNHASRVGEKYNKSDSKESACKSSDSKWVPLSANDRPEEKEKPIIIAYGNGAFSGSMKGRKAAPTKAILKELQQQARQRKTPTFVFLMDEYLTSQICPVCQKRNLQNAKEGKDARGQEGSKIHAVLTYSNKSWTTMFWNRHSMAASNILHVTVSRATCSLFVNDSLPVEMNKHIRNQSSSGSAGRIHRTVSQAGLYAAARLSSSTSAPPWDQSHASAMTSEDSAIPMPTSTETRNGPLRSRLSGALNALAISPDAESVAVAGLLKILSVSKSEVVETINLRAGSQFNEWLMGFPPQVTKYKVATAATNGAIILWDLNKTGRKAERVITEHSRAVNRICFQPDNGNILLSASQDGSMKCWDFRDPKNGARYRFEGKSESKWDMRNPKALYDRKVSAHNGPCLTVDWHPGGKIVASGGRDKTIKVWDLGADNRRPLYTIRTMAAVARIQWRPDHDDEIASCALLTDSRIHVWDVRRPNIAKFAFDEHESTPTGKHFIPKTAKKQTKKWKRPGVAITSEDAAAQYIPPQSCGIAHMPLFDFESFSVFAENYAISGKDISAICENNTRKVAWKMGRYRTSQTWKIIALLFDTEEEEEEEKQSTHEQDLKEQDALNERTGDDHLKESASEQTLAMQNQNYLTDDRDSEHEHIEERSDSDLEEEKQIGNFGEDKEISDAESSIPCSEHTELWATWQHRDVVMGLLDYYTEQVQLSGLYYMNAF

SEQ ID NO: 3762 - protein, 472 aa, Apophysomyces variabilis
MKMIQNFQCNAQYYTDNYHELVDGQIVPYLTLALVAIVDKICDDLEALTPKPATQQAISASPGAYIPTLKYILSSYEEEHKIVAASEKSSSDTTLPRLFSISSKPICRWRFVSTNAKLLATLLSIREPTQPSEYPRVFFEALDLTRFGFNGLGDFAGNVNHRFACKILSDGFAVNLVFARKQKEKVPATEIDLEDLTFDEVQQWFEPWAVDPGLNQIYTAADGNGSQRHQVRRVSTKEYYAMTGSTRRGKQLEKRKDAAGVTHIETGLESCKTASSEQYHQFVECFAQNFPVLTAFYGPDMAEKRFHNYQGVQCAREELVNVLVNGGKKPQESGIRSTQNKPHPSTKKSSKGIQASKKIPLIVFGSAMFGASGHASRKGKRAALVNPFDEFYTSQMCNICLQRGLEKVPISDSVSHHGVVVCKHCRTLWQRDINTAKNMFYITNSVWRGQGRPIEFCRPAKNDVATTNVVSS

SEQ ID NO: 3763 - protein, 1289 aa, Apophysomyces variabilis
MFRLSAMQVPHPQIRENKRKRKRVIQSNISLDKAIEALHDVFQNQLVTIISKELEDKPRKNTAKKARFQSEVEKQAKTNKILQELRTRLEKADRVPRTSLEQADDSINVTRGTIRRTLCFHYPEPASIGKLWRDYAAAHFNDAVAEARARLEEHGEVEEAGSSKEVTVNDDSKEEKEIIRTCSVRLSKILREDLDNQVKQTFLETIAITSEQATNYASELGTAVHATMLKYASGSVVLDAESKQAHYQQDGKTFNVLDVIHEEWIRHPELLNSELAIAVAPMPDNIKNYVKALPKKHNDEFLNLFTEAHLQFLHSDYFGRQSYKAQGKSFWSSLQHQGLKDLPKPPAGLSTVMHFQLKQYATDLQNMWAGGLFHKSINHLLRILLRINLASEREKKIQEITEKKLQEKEKQREESSRTMRRKKEWRRRKIKGRLKQERKSLRRLEKRLGIEMDGNQRANLLQRKKSCVEAIRRLEKQAKEKYRPKKADNQPHQKDEEARGDMDKLAISADISVMDDEEIEETIETAIEEAQDELEEVEIKTLKKEPSRRRLIRIQAITKKLLLSTDIDGNVQASDVSDIWNDNDELQKVEIDIVVKLANALRPYVPKGRLSSAISLRLRFVLLSNAILHATGYSKFTANICPTISPASIHALPLDAASMYEMFGSNSAKFNLYKEDGSTIDNIREARTNKSAVIGSFFDQEKVKHICNTRGLEPRWRITITPHQMAVIDGDVKKGRVIDTSHYEERKKKSKGKRADSASSQFEDKSGLDIANITCSLEDAKQRVKALESAEKQIKNALRQREEVVESRMESYRRSKDVARRKVRDKRKSEKFDIYDSRAKQKQTDIYKDLKAAKLERAKSQSELSKIRSQLADQRRLRYIYQKQLDILKKQQTNKETKPKDDEQEQETKLCKVASWNRPGCEANTEFLDISELHQEVKQDPKKTITFGGTDYGLRTLATTVPVTMERARLHFDLYNRQFGDGQTPVSIPKEMSTLPKPMRITAGYLEEKTLCRSFRKKRERRKKNNPAVISAEKTLSKRSSASATTVEQVLESQAVKRNCRRELRAFYHSNRAEHEKRTQKLYTDRIYDQVAAQERKFIKAAATTQTDGRQKALPIMAIGTQGTGVGLRLKGHLKRGGKWLRKRHRRYVPVSMTNEHRSSQLCVYCFERVERAKARRRKSRQWKTVRVNGASQCVNPCCPAYQSGHATQNRDVQAAVAIGLASASNILSANRSTLTPFDPSIFSAGKPFVPGATNFWCVNSSRKLCEELREPGPVAMTGVIRTYASEEF

SEQ ID NO: 3764 - protein, 918 aa, Apophysomyces variabilis
MPPRKRPRINSKPLPPNQTLITSFFTRTNRLQVEPDPSETVSTSCIDQKDIIQAPEDPSSEEQSGTKNEITDLDENNRPSIVPQDLAKLLGISKGKGKEKANDTLEEDFQDTFSPKQGTWADEQLQTLKIVPPTEATLDAGYDPGPSTGKKSKALVKAEKAYAKRNAKFDAKAKLQEDKQEKRIASGSTLRCSTCGGTDHQRRTSKLCQDHAKKRKPPKNFKRTSVIKTSLANTCRSAEFVRSIEDVVKHIRDVTYVGSLFANFFFVQLLSENQNIPPITHDLCYSIFSMVAGEGKNANESLQEAYLRFKVSVPEYKETKFRSRGYMTVISSAAQEYEEAIRNHLTANFEPKTIQYLLVRMSDDKDEAFRWKSTVAERRLLANFVYKKACGTEAPWPKSITDNRHNRDYVKSCVEFLQQSIGITEIDETKLNAEPHLFLPWFFQVLKRLEQKIFIAEPTAQKYVSPGYIHRMVDKVLDKEKLPKRLVKSLEVNVRIAIRKREKLSLAKKFARISETALSKLQEFIKETGDAIDAGIFKPEKHTDPRGMRRFTMLPVYSTQMRHITMDNQALGRLMCKSGLRDTLAPVKPDEAREVYFKLFDMSKIGYRTIEDLETEKVLFWDKIRTDGTDVEFIFKKYKAPYDPKKKPLTPSDMKGKFDDALIWGVDPGVASVFVAADGTHDSRHRVRSTSTEEYYSLCGFNHASRVREKYNKQEPAIKDLIDKTPSLKTSDLEKLIIAIRYCIQHYDTISEFFSRNQRSYSKENTCKSSDSKWVPLSANDRPEEKEKPIIIAYGNGAFSGSMKGRKAAPTKAILKELQQQARQRKAPTFVFLIDEYLTSQICPVCQKRNLQNAKEGKDARGQEGSKIHAVLTCSNKSCTAMFWNRDSMAASNILHVFLHMRDYANRRPGPFIRLANT

SEQ ID NO: 3765 - protein, 801 aa, Apophysomyces variabilis
MGTNISNNNPNFPQDLRDHWRAFLDNHPNALYPVRNFSGYSDALSAACVTLATTYSNNVAENFEGRLKFYISRRLTKLILGLSQKNAKAIAGDYIYELLARGDPHWPFEDELAVSDFDQAVETICGEFATLMPEWQTNAEKLSAFPGSYIPVLAYILTEYNQEHEEAKQKQNAPKNQEAEKAKDSFKDLPRLFSLSPSPSTHWRFICVNSKTLQQLTNISHQKDYDDQLSQFYQGFDFHKLGFDSLEQLIFTDGYAIDFQFARARKTESVVTDVSLSVEDIDGSHIYDNFAPCAVDPGINQVFTASYGCGSEPHEIRRCSTKEYYVYTCSPNRQNKMEKEKKQQGIQDIETSLESGKTAQIEAYDGYLRSIFGNMDLLFQLYGPHRAEARFRGYQGVQRAREEMVNILAFGVKVVLSFMTGTTNAATATSEEANASLDRPITEADGSSNTEAFVLDPAIASTAYEEEKRRQAMKRRNYKFWSDAEVRKILEWMTSEGNIGKFSRNKAQACREVAKELFNGDEYMAISIRSKLMSLEKCYFAAERLRASLKETDMDESTINGKVPKNVVAKVTDFNRFQEESRALFAESSTPVASTTSASSVPQTMSTTTTAPVVIPATPENVPDTNATAANVTRPILPRVPEVLPSPEYTATLELPTLPAAAASVLNDREERMTHVCHCELSEPSYSRRSCQTEKRKASDDHPDHEYSKEKKAAIRQARYAARQAEFEAIKAKHEEQKMEFAVKLAEIEKERDLLGLRKLELEMEIIKLRGNFFSLQVGLQLQHIRADTHVRVHPGQQWVM

SEQ ID NO: 3766 - protein, 603 aa, Apophysomyces variabilis
MYKRHIKSRPARSQSAAETVEASTQQAEIVSYDPQISVLLKNDLSANEVTEFLLDNESDDNDEDASVKEEKENNELPDVTARRIRVLKRIAKDHIIAGIEHKELKKFIRDAYEGQDSSREVDAVYNLCSAIRAFAPPKETQPCVLTNLPVVLLANIVQRVAGYAEFTMKICPVMTTTIGGPAYMLNGSDMQAISAADMAVHRKNETLGSFLDTEKMQDICSSYGLDFDDRIILQEFKERRSSASNQHKRRLSSELKALKKARAANQSQVNSTRLTLKDMHNQRYHLWEKAKMDPKNKKPKKEIRYNPPNNQYLACEEDEEYIDLQSFIRSMEASGKEVSFEGTDYNLATMSTAVSLSNQRCLQMIETYNRSSSLNKKTEHGQTMKEPAEQMMNTVSPKCLRTTAQELNHFAGYIRILILMFPFYALKPDVKNAETKLSKNSANLATSSSEIWRCHQVALENRKTLREFYHSKRARKERNTINRFRSIIHNKFASIERRFMRGSDKHSTVICIGKLGTCVVSRIGGYSRRGGAQIRKRHRCHTNVVITDEFRTSQTCSVCFQPVVKPKGKRYIDGKWKGFSLNGGSLCMNPGCASFATGSNTKN

SEQ ID NO: 3767 - protein, 1193 aa, Apophysomyces variabilis
MNRLRQALEKADRIPRGSFEEADKKAGVPKGTIEKQIRSRLSSSHKTGEFWRQCAVDNFDDVLAVVKAEGKQNRPKKKDEDSDNLFRTCTVPLKSVLRPDLDENLKRIFMHTVESTSVQMTDYVSDLATVVRATMLKYVSVSLSLDPASGSVKAELDQTSTGFDIRTVVPKEKLRDESMLVDDYFVPVAPMPDNLSQFLDEMPGRRNNDLLSMFNENHIQFLHGLYFGTKGNVSKEKHYLWMQFHDQTLDNQPVIPDGLCRTSHFYMKQFSTNLKNMWAGSLYNRSMNHLLRVLLRVNLAPRREEKVREIREKAKLAREKEIEQQQVIKYQYRKKAIKRKLKNEKKQLRNLKKQIEQEEEDDILVRLATRAATCAEAIERLENQLLARSESRSNPKSIKVEQMNNRASVTKEEEQQAKILISLGETHIGVFEQIEEELEEEEKEETSEPSRRKLGILQAITKALLQSDKISGHVTVEDVLATSHADDAFSPQEIDTVVNIANALRPYVIRGQIAPCIPLRLNFVVLANALLCSIGYQEFTASICPTISPASVHALPLDAVAMYEMFGSSYAQLDIYKADGSVFTNRDEAIAEKRTVIGSFFNVEAIEKTCKERGLVPRWCITVTPQKTAIIDGNVCEQRRPIESRYEARRKKYYRKKEPYVQEPSIEQQSTPELAKTLDDTKKDVKTLETLKGQHTKLVKEATKLVAGLRSSYQENQAICQKRIRDKRKADKHENVTEKEAAYQQQKLSYEALKAAKLNWSNQQMALNQVHDRLANARRKKYKLEQLVKAHQKKKGKSPAGRKERKSKGGEDEKMEEADGDEEDTKYKKEKEKKKDKHNDNNDEENEEEDEEEEEDSLCRPQSGRRPGCEDSVGRLDLGPLLEDQNNVLTFSGTDYGLQVLSTTVPITRQRADFHLQLYNRYSMLGVNNVNDHDDDIDVSPTNMLQLPKPIRITAKSLDEKTLARTFRKKRERRKKSNTEVLAAEEQLKEASMEKAMSVQDIIRCQKIGRSCRKTLRDFYHSNRWHKEKVIQDLYKERIYDRVAANERRKIAMEAGPHDSGRRVIPVMAIGTQGTCVGSRLKGHPKRGGKWLRARHRRRYKEIKWRTMNGSSRCVNSKCVTFKAGRTTQNRDVQAAVAIGLAAISNLFSAERITLPPFDPSHFDAGISNIADTTVQRCVQSSSESHHTGRCYC

SEQ ID NO: 3768 - protein, 1210 aa, Apophysomyces variabilis
MNEIQLPTPRGSARRKRKRQTEPQISYDQAKNTLLGVLLQKLKSTIANELWKNETKNSRKTKKGKQSAKTKGKRLKAQEKRMNRLRQALEKADRIPRGSFEEADKKAGVPKGTIEKQIRSRLSSSHKTGEFWRQCAVDNFDDVLAVVKPEGKQNRPKKKDEDSDNLFRTCTVPLKSVLRPDLDENLKRIFMHTVESTSVQMTDYVSDLATVVRATMLKYVSVSLSLDPASGSVKAELDQTSTGFDIRTVVPKEKLRDESMLVDDYFVPVAPMPDNLSQFLDEMPGRRNNDLLSMFNENHIQFLHGLYFGTKGNVSKEKHYLWMQFHDQTLDNQPVIPDGLCRTSHFYMKQFSTNLKNMWAGSLYNRSMNHLLRVLLRVNLAPRREEKVREIREKAKLAREKEIEQQQVIKYQYRKKAIKRKLKNEKKQLRNLKKQIEQEEEDDILVRLATRAATCAEAIERLENQLLARSESRSNPKSIKVEQMNNRASVTKEEEQQAKILISLGETHIGVFEQIEEELEEEEKEETSEPSRRKLGILQAITKALLQSDKISGHVTVEDVLATSHADDAFSPQEIDTVVNIANALRPYVIRGQIAPCIPLRLNFVVLANALLCSIGYQEFTASICPTISPASVHALPLDAVAMYEMFGSSYAQLDIYKADGSVFTNRDEAIAEKRTVIGSFFNVEAIEKTCKERGLVPRWRITVTPQKTAIIDGNVCEQRRPIESRYEARRKKYYRKKEPYVQEPSIEQQSTPELAKTLDDTKKDVKTLETLKCQHTKLVKEATKLVAGLRSSYQENQAICQKRIRDKRKADKHENVTEKEAAYQQQKLSYEALKAAKLNWSNQQMALNQVHDRLANARRKKYKLEQNRTVGESASKEKSGRRPGCEDSVGRLDLGPLLEDQNNILTFSGTDYGLQVLSTTVPITRQRADFHLQLYNRYSMLGVNNVNDHDDDIDVSPTNMLQLPKPIRITAKSLDEKTLARTFRKKRERRKKSNTEVLAAEEQLKEASMEKAMSVQDIIRCQKIGRSCRKTLRDFYHSNRWHKEKVIQDLYKERIYDRVAANERRKIAMEAGPHDSGRRVIPVMAIGTQGTCVGSRLKGHPKRGGKWLRARHRRRYKEIKWRTMNGSSRCVNSKCVTFKAGRTTQNRDVQAAVAIGLAAISNLFSAERITLPPFDPSHFDAGISNIADTTVQRCVQSSSESHHTGRCYC

SEQ ID NO: 3769 - protein, 1275 aa, Apophysomyces variabilis
MLPNLDFVGNPGLSMGDVISRSPTKNYEQCMQTVTAGARGRPISKENRSKALQWLQARGIQTVSKLFNTSPLEAALSVAVVRCLGDKQHAVSLRLSDNQTIPANGLLRLIAIAKMYNIRVYLFSTQSKPKVIRNNQSVYNMSLLHEVDSHTGTSRWVPLYIARFTSPKLPGPETTIEKSPFISPAATMKNVAGERRKKKQRAPLGVTEEVIKDELRKEINKRIHLEFSRITRNKNPTRAALEKFKEKFMNRNKTPKGLITSSGSSDHLFKTLKEKYGTKASPSALEQHFKGPDKPVLLWNDMARFFYRNQLKKITDHEIQAASVKDSKRKASDIHGDDSEGDNRSGDEPSEDEEQSDDEDDNHQEYVRVATTTLRKLVRPDIDLDTVLRGDVYQFIGYDNYSTQINLADVFPADYDFGDHKAKHSIVSLPFINADAAVDSNIFTFAQFQNMFYSTVGGIYTEQIPKPWFSINGVLSSLVDPNDDAVASQFQADSLRALYTAANNLYSGSLYPRSLANVIRLLLRVNLAPRRMSKYMQLVKEKAEEKKDRQEQRQDLRSNVQRRRNRSYWTKELKKAYMNGRPDNVVETIQRKIADNLPRKDRTEDQKKSNEEEIKSQKADDEYEAFRLDQAEDDLVNDSEDDEDTAATTSSQAPITSKETSARTIRTLVAIVRMLVESPLIKRTISAKDVADAVHTGTILTITEQQVAAKVANFLKPYTPRRNEPDEPPAKHILTVLPIAALSNVVSTILGMQDRVNKLTIETSNKWALPVKADGIYKIMIDAFDIPTNRQGEFITSGLQARTEKETVFKAFFQMDKIHRMMNRRHLFFRWRLVFVNEWTVRVVGTINRNTPHQVSALQERRNNQRFVEPEIELTLSKAQLQERIDRTQASILGLEQQLKPIQKEIGALEKERMNHSTSAHGRTNSTAYRKLKQTRQQIRSKQNTAIVLQEKLKQARRDRYVLNKAMRERKRKKQKRSSQATSSAKAKITEGYMPQMLSLVKPLFEKHSIPVCGVDPGIRTTGVSTSTTSAWMIQRIRNFTSNTTTELRHDIYNTWSLRASAVNHHSRSSRHRLRRERAKNAEKEGTEAENRRIEREKRTREVFTQKAYHKYADIERMHFPPDMIFQKAVHFYGHWQPTNSRIRGHARRGLKRLRGVQRRKGLVVIVNEYNTSKTCHWCLKPLQLQKYRGKDGKVRKCNGAVCCVNPNCVTVVNGCSTMNRDGNASKNIALKGVSMIVSSDGSPIPVFNSQYSSNYKLAQQFASQPTPVRLLHGP

SEQ ID NO: 3770 - protein, 719 aa, Apophysomyces variabilis
MASRNKRKKKPQASTSADTQSDDDFQQLLPPKGKLNMKMQMTDSEPGPSTLPSSSMVSTQNNSSKEKPRSLKGKEKATFDSDDDFQPLPPPKRKRTPSGHPSSSADFVQAPLTSSKSKCFLKPKKPMQSGAKMKFVEAIEEVVKHVWDITYAGSLLANFFFVRLLSENRSIPPITHDLCYRLFSLIASKGKSADDDLQEVYANLKTSIAEFDEEKFRSQGQACGTEPRWPTAIPDNKENRSYVETCVESLKNFIGVIFIDEEKLNAEPHLFFPWLFKVLRRLEQKVFITETTSQKYVSSGYVYRMILGDVNLPKRLTKSLEVAVRIAIRRRKELFLTKKFDRLPKSVISKLQNFIKETGEAIDNGIFKPEKYTDPRGARRFTMAPVYNMQMRHVTIDNQALSRLMWKAGLRSTMSPIKATEVRKEYFQLFDMSKMGYKTLESLETEKILFWDKIRTDATDVEFIFKKYKTPYDPKKKPLAPSDIKGKYEDAIIWGVDPGGSSIFVAADGTGTSQHRVRSTTTEEYYSLCGFSHATRSREKYVKGDPAVKTLIDNIPSLKTTSMESLTTAIRYCMQHYEHISEFFSRDRSSKSYIQRQKGRSEVAKRLLYGSKKYDQSSKQKEPKRGDSKWVPLSPNDRSDEKSKPIIVAYGNGGFSGSMKGKKAAPTKAVFKELQQQARRRKTNTSHPKSVQHVRLEICRKRTKKMMHKATKARLYMLY

SEQ ID NO: 3771 - protein, 1490 aa, Apophysomyces variabilis
MFRLSAMQVPHPQIRENKRKRKRVIQSNISLDKAIEALHDVFQNQLVTIISKELEDKPRKNTAKKARFQSEVEKQAKTNKILQELRTRLEKADRVPRTSLEQADDSINVTRGTIRRTLCFHYPEPASIGKLWRDYAAAHFNDAVAEARARLEEHGEVEEAGSSKEVTVNDDSKEEKEIIRTCSVRLSKILREDLDNQVKQTFLETIAITSEQATNYASELGTAVHATMLKYASGSVVLDAESKQAHYQQDGKTFNVLDVIHEEWIRHPELLNSELAIAVAPMPDNIKNYVKALPKKHNDEFLNLFTEAHLQFLHSDYFGRQSYKAQGKSFWSSLQHQGLKDLPKPPAGLSTVMHFQLKQYATDLQNMWAGGLFHKSINHLLRILLRINLASEREKKIQEITEKKLQEKEKQREESSRTMRRKKEWRRRKIKGRLKQERKSLRRLEKRLGIEMDGNQRANLLQRKKSCVEAIRRLEKQAKEKYRPKKADNQPHQKDEEARGDMDKLAISADISVMDDEEIEETIETAIEEAQDELEEVEIKTLKKEPSRRRLIRIQAITKKLLLSTDIDGNVQASDVSDIWNDNDELQKVEIDIVVKLANALRPYVPKGRLSSAISLRLRFVLLSNAILHATGYSKFTANICPTISPASIHALPLDAASMYEMFGSNSAKFNLYKEDGSTIDNIREARTNKSAVIGSFFDQEKVKHICNTRGLEPRWRITITPHQMAVIDGDVKKGRVIDTSHYEERKKKSKGKRADSASSQFEDKSGLDIANITCSLEDAKQRVKALESAEKQIKNALRQREEVVESRMESYRRSKDVARRKVRDKRKSEKFDIYDSRAKQKQTDIYKDLKAAKLERAKSQSELSKIRSQLADQRRLRYIYQKQLDILKKQQTNKETKPKDDEQEQETKLCKVASWNRPGCEANTEFLDISELHQEVKQDPKKTITFGGTDYGLRTLATTVPVTMERARLHFDLYNRQFGDGQTPVSIPKEMSTLPKPMRITAGYLEEKTLCRSFRKKRERRKKNNPAVISAEKTLSKRSSASATTVEQVLESQAVKRNCRRELRAFYHSNRAEHEKRTQKLYTDRIYDQVAAQERKFIKAAATTQTDGRQKALPIMAIGTQGTGVGLRLKGHLKRGGKWLRKRHRRYVPVSMTNEHRSSQLCVYCFERVERAKARRRKSRQWKTVRVNGASQCVNPCCPAYQSGHATQNRDVQAAVAIGLASASNILSANRSTLTPFDPSIFSAGKPFVPGATNFWCVNSSRKLCEELREPGPVAMTGVIRTYASVMFMLRSSSSCILRRTFATSVTACTAKKLNENRNMVNGVLIPGQYLHFFKDNKKSKSSSAENTDSFVGFEHIHTKAPRAFVQNEFDSSPSKAQERMAERINRALSMVYSVESLPTHLITPSAIRIYNVKVSRNLRRCQISYQPLTTNDSKKTTVHDAIRKHNHLLAALIRSHAQIPRPLSIKFVPDSQAEELESVYEKIAAELK

SEQ ID NO: 3772 - protein, 732 aa, Apophysomyces variabilis
MNLKAVCRHCGEHGHKLKTIGKKRKATEVDTEQQKAEKKKGRTSRDALNANPDAARRQRRNRTIKQEIQARYGNKVERFSRKIPFKNVVRPEYATLLQSRITSLSEFMRNLIIRMQLFVNAYIIGYNQREIPVYLYSQNFWYSIAQLVMNISVTNTNPYMPDNIYDFWNQFRERHPAIVFPRKNFTGYSDALSAACKTLRDTYTNDIVENFQQRVCGFIIHRLQMLVPLCPHAWKMRTSTYSLAIVNLRDFLIPLMPQTCNIEALSERPGVCIPVLRAILEMYEQEHQQSDDEESGNLPRLFSLAPQPSFHFRSVIINAKALRALVQVRNDTDDYQGNLEIFNQVFDLNKYGFRRSVTYYLRIMYEAKHHFSMNCGTFTNEICTDGFSVVFHFARGAVELELENFSTEDINRYYCVCGIDPGLRHLYTASYGAGETEHEIRCCSSAEYYCMTGSPQKGQQLLKQKRHHGIDTIESNFPNAKTCDIRKYNGRVDYFFLHKDVLFNFYGPNGRERRFRDHQGRQRAVEELANILIDRGRKYNHRKRKHRGANRKKRKKNREQRRRHKKKNTGRIPEQPLSAVRSTVNESRRARSWKQPQPNPDNNGKMPLFVFGAGMFGKDKYRYKGYRKAAVNKLWRILKRREARGEVFVVKIDEYLTSQCKTKILCNVVTEDGIKHHSIQDCKTCRMRWNRDINASKNMFYIAQSIWNVHGRPDAFRRPTQITVTNAGPERV

SEQ ID NO: 3773 - protein, 590 aa, Apophysomyces variabilis
MGDAISCSPTTNYEQYMQTVIAGTRGRPILKENRSKALQCLQARGIQTVSKLFNTSPLEAALSVAVVRCLGDKKHAVSLLLSDNQTIPANGLLRLVAIAKMYNIRVYLFSTQSKPKMIGNNQSVYNVSLLHEVDSHTGTSRWVPLYITSSGSSDHLFKTLKEKYGTKASPSALEQHFKGPDKPLKKITDHEIQAASIKDSKRKASDIDGDDNEGDNRSGNEPSEDESNAMKKTITIKSTFVWLPQLCENLFAQISILILTEINLADAFPADYDFGNHKAKHSIVSLSFINADAAVDSNIFTFAQFQNMFHSTVGGIYTEQIPKPWFSINSVLSSLVDPNDDAVASQFQADSLRALQATPSAKAKITEGYMPQMLSVVKPLFEENSIPVCGVDPGIRTTGVSTITQRQSYGTIFTIPEVSEHELSTITRARADIVCAENEPRMLRKRGPKLRTGELNVKSVLERCLPRKHTTSMLTSNPTNSRIRGHARRGLKRLRGVQRRKGLVVIVNEYNTSKTCHWCLKPLQLQKYRGKDGKVRKCNGAVCCVNPNCVTVVNGCSTMNRDANASKSIALKGVSMIVSKDGSQIPMFSS

SEQ ID NO: 3774 - protein, 334 aa, Apophysomyces variabilis
MTDGFSVHFQFSRAKSTQSHSEEQVRLQDFTTDEVAQFYRPVAVDPGIGHLFTAPYSHGADQHEIRKCSTAEYCAVTGSGRKNHALDKDKQATGIKDIESKFPTGKTTENDQYAKYVNYFFTHRDANFRFYHSGRGHSRFHNYQGRQRAREEIANILVQGGKNNATQGVEDLSRTAESAVRSTTSNRRLPRWKKTKVKFDNDGKMPLVVFGSGMFGKGQMKYKRHPPGVVGQLWKSLKRKEKNYQVLVVTIDKYLSSQQNFDETQDFGWRYSSQCPGLMVYWKPTRCPQSTRARRNSNQYHRCERGFPHWDLDCYGTGIRQCFPVSISANAYLP

SEQ ID NO: 3775 - protein, 1275 aa, Apophysomyces variabilis
MLPNLNFVGNPGLNMGDAISRSPTKNYEQCMQTVIAGARGRPISKENRSKALQWLQARGIQTVSKLFNTSPLEAALSVAVVRCLGDKQHAVSLRLSDNQTIPANGLLRLIAIAKMYNIRVYLFSTQSKPKVIGNNQSVYNMSLLHEVDSHTGTSRWVPLYIARFTSPKLPGPETTIEKSPFISPAATMKNVVGERRKKKQRAPLGVTEEVIKDELRKEINKRIHLEFSRITRNKNPTRAALEKFKEKFMNRNKTPKGLITSSGSSDHLFKTLKEKYGTKASPSALEQHFKGPDKPVLLWNDMARFFYRNQLKKITDHEIQAASVKDSKRKASDIHGDDSEGDNRSGDEPSEDEEQSDDEDDNHQEYVRVATTTLRKLVRPDIDLDTVLRGDVYQFIGYDNYSTQINLADVFPADYDFGDHKAKHSIVSLPFINADAAVDSNIFTFAQFQNMFYSTVGGIYTEQIPKPWFSINGVLSSLVDPNDDAVASQFQADSLRALYTAANNLYSGSLYPRSLANVIRLLLRVNLAPRRMSKYMQLVKEKAEEKKDRQEQRQDLRSNVQRRRNRSYWTKELKKAYMNGRPDNVVETIQRKIADNLPRKDRTEDQKKSNEEEIKSQKADDEYEAFRLDQAEDDLVNDSEDDEDTAATTSSQAPITSKETSARTIRTLVAIVRMLVESPLIKRTISAKDVADAVHTGTILTITEQQVAAKVANFLKPYTPRRNEPDEPPAKHILTVLPIAALSNVVSTILGMQDRVNKLTIETSNKWALPVKADGIYKIMIDAFDIPTNRQGEFITSGLQARTEKETVFKAFFQMDKIHRMMNRRHLFFRWRLVFVNEWTVRVVGTINRNTPHQVSALQERRNNQRFVEPEIELTLSKAQLQERIDRTQASILGLEQQLKPIQKEIGALEKERMNHSTSAHGRTNSTAYRKLKQTRQQIRSKQNTAIVLQEKLKQARRDRYVLNKAMRERKRKKQKRSSQATSSAKAKITEGYMPQMLSLLKPLFEKNSIPVCGVDPGIRTIGVSTSTTSAWMIQRIRDFTSNTTTELRHDIYNTWSFRASAVNHHSRSSRHRLRRERAKNAEKEGTEAENRRIEREKRTREVFTQKAYHKYADIERMHFPPDMIFQKAVHFYGHWQPTNSRIRGHARRGLKRLRGVQRRKGLVVIVNEYNTSKTCHWCLKPLQLQKYRGKDGKVRKCNGAVCCVNPNCVTVVNGCSTMNRDGNASKNIALKGVSMIVSSDGSPIPVFNSQYSSNYKLAQQFASQPTPVRLLHGP

SEQ ID NO: 3776 - protein, 315 aa, Apophysomyces variabilis
MFRPLATDGCTAAFTFSRKRQHLTEDKKSAKTMKDFQGDLHGLNLIGVNPGITDAYVASNGHEKYSHEIISSSTKEFYHLAHYNASKAIMVRMKNEKAKIQQIEKDMPSVKTASISQFDRHIGRQQASDEFAERLISGGNALSLTWTSRRRLDSSLENRSRTSCRRLPNTFARNEWSKATPHPTKRKPLFAFGSAMFNSTLQGIRAGISNIIRRKIKENKARGRCKVVDVDEFKTSKICSGCGAKKLRNVKGSLGQSLHAVVHCEQCKTVWDRDCNASRNIRRIAEHMALNNNNRPSLFQRKNQLPGQTPSKACK

SEQ ID NO: 3777 - protein, 279 aa, Apophysomyces variabilis
MLSLLKPLFEKNSIPVCGVDPGIRTTGVSTSTTSAWMIQRIRDFTSNTTTELRHDIYNTWSLRASAVNHHSRSSRHRLRRERAKNAEKEGTEAENRRIEREKRTREVFTQKAYHKYADIERMHFPPDMIFQKAVHFYGHWQPTNSRIRGHARRGLKRLRGVQRRKGLVVIVNEYNTSKTCHWCLKPLQLQKYRGKDGKVRKCNGAVCCVNPNCVTVVNGCSTMNRDGNASKNIALKGVSMIVSSDGSPIPVFNSQYSSNYKLAQQFASQPTPVRLLHGP

SEQ ID NO: 3778 - protein, 666 aa, Apophysomyces variabilis
MVNRCKNSIEAFDGDTCRLEVENHATVPPGWPRNRNKLITALFQRIWGMSVDISEAGADQEDFEEYEQNQEEERQVTGDILAGLANDVHTQIEDFITAERNLQVKGIRVSEVNLSECLGENGTQRTNGGNNDEENDFITAERNLQVKGIRVSEVNLSECLGENGTQRTNGGNNDEENGDEDDEDDVLHRTYGGKLSRAKAARLIPFMIYFLERREAGPNDRRIAELTRDNLQNACVRLQGIKSRDPFSALFDIRRQATITRDGGVDVRDRGYMRWLNQRIPGNENKLRFSRRRVFRTDGVRLYCIYNDWLRSRRGSTTCKYLSEIRRTTRETLKDTWQAGSSGDQYDYLQHYDGVDGLDFGEVCAAASVFRPREPGLYARKAANNIDDIEAALSEGSPRSTNDRYQEYLRQLKTNENGLRLWKFYSNRSVRRRIWDNAISQRSCLDKACYLITNQARRTFDMNHEMMIIVDIQDEGFGAYEPQDCQCFVPEDQPEESKQGQTTCRRRPRPTYRLFATPPTATVQDRARLENGQEKVLRVVQCANCDRTFHRDGNAADNQATIARYMLRFQQRPRWFIRPSRRLEAAGEEKAMVMTGRAGLQQRASGGEVTEVPEIAEPRRHPSEEAAVITPTARRRTRASQTETMVEPPRSRRRISRREEERPESS

SEQ ID NO: 3779 - protein, 347 aa, Apophysomyces variabilis
MHDSTMTTKKGADPDFTDIYVCSNESNDVYRDEADLEHEDIVELPEPEHYGRFFVGFVGSPLANDEPDEEFPTVEVAEGEDDDAEFEPHQIRQLSTAECCTRAGFKKTNAKGQHKALWEVVPDVLLLINEGRQGLDEEMVKIFINGGTKYRDPLGNADRLFRARQQDQRVNNETLHPDGIRRWRRRRIQRQEVGEPSPPSHLPKEDKWRKSFMEYDTAKVPVVVYGTLRFGRNVYKCKPCELADRCRKLLKRADTSRQLIMIEMDEYNISQICSRCGTKSLTKLDLGGHRCLHSVLVCGNCHTVWPWEVNTSRNIRAVFMATIQQRGRPAIFTRPCTTTTAPRNRNV

SEQ ID NO: 3780 - protein, 1052 aa, Apophysomyces variabilis
MNYEKKSIRGYIWNFPELQENKNPTRAALEKFKEKFMNRNKTPKGLITSSGSSDHLFKTLKEKYGTKASPSAPEQHFKGPDKLLKKITDHEIQAASIKDSKRKASDKHGDDSEGGNRSGDEPSEDEEQSDDEDDNHQEYIRVATTTLRKLVRPDIDLDTVLRGDVYQFIGYDNYSTQINLADVFPADYDFGNHKAKHSIVSLPFINADAGVDANIFSFAQFQNMFYSTVGGIYTEQIPKPWFSINGVLSSLVDPDDDAVASQFQADSFRALYTAANNIYSGSLYPRSLTNVIRLLLRVNLAPRRMSKYMQLVKKKAEEKKDRQEQRKGLRSNVQRRCNRSYWTKELKKAYMNGRPDNVVEAIQRKIADNLPRKDRTEDQKKLNEKEIKSQKADDEYEAFRFDQAEDDLVNDSEDDEDTAATTSSQAPITSKETSARTIRTLVAIVHVADAVHMGTILTIAEQQVAAKVANFLKPYTPRRNEPDEPPAKHILTVLPIAALSNVVSTILGMQDRVNKLTIETSNKWALPVKADGIYKIMIDAFDIPTNRQGEFITSGLQARTEKETVFKAFFQMDKIHRMMNRRHFFFRWRLVFVNEWTVRVVGTINRNIPHQVSAIQERRNNQRFVEPEITLTLSKAQLQERIDRTQASILSLEQQLKPIQKEIGALEKERMNHSISAHGRTNSTAYRKLKQTRQQIRSKPNTAIVLQEKLKQARRDRYVLNKAMRAVSKKGKGKEKSSASTSRSRKRKRKKQKHSSQATSSAKAKITEGYMPQMLSLVKPLFEKNSIPVCGVDPGTRITGVSTSTTSAWMIQRIQDFTSNTTTELRHDIYNTWSLRASAVNHHSRSNRHRLRRERAKNAEKEGTEADNRRIEREKRTREVFTHKAYHKYADIERMHFPPDMIFQKPVHFYGHWQPTNSRIRGHARRGLKRLRGVQRRKGLVVIVNEYNTSKTCHWCLKPLQLQKYRGKDGKVRKCNGAVCCVNPNCVTVVNGCNTMNRDGNASKNIALKRVSVIVSSDGSPIPVFSSQYSSNYKLAQQFASQPTPVRLLHGP

SEQ ID NO: 3781 - protein, 906 aa, Apophysomyces variabilis
MQFFVNSYIIEYSQREIPVYLYSQNFWYSIAQLEMNISVTNTNPHMPDNIYDFWNQFRERHPAIVFPRNNFTGYSDALSAACKTFRDTYTNDIVENFQQRVCGFIIHRLQMLVPDLSKSSASRITYDYLYKSIAGGEPAWSSCLENASFDLFLAIVNLRDFLIPLMPQTCTLEALSERPGVCIPVLRAILEMYEQEHQQSDDEESGNLLRLFSLAPQPSFHFRFVTINAKALRALVQVRNDTDDYEGNGEIFNQVFDLNKYDFRRSVAYYLRIMYEAKHHFSMNCGTFTNEICTDGFSVVFHFARGAKLNTVELELEDFITEDINRYYRVCGIDPGVPHLYTASYGAGEAEHEIRCCSSAEYYCMTGSPQRGQQLLKQKRHQGIDTIESNFPSAKTCNIRKYNGRVDYFFLHKDILFNFYGRNDRERRFRAHQGRQRAVEELANILIDGGRKYNHRKRKHRGGNRKKRKKNREQRRRHKKKNTGRILKRREARGEVLVMKIDEYLTSQICHKCKTKSLCNVVTEDGIKHHGIQDCKTCRTPWNRDINTSKNMFYIAQSIWNGHGRPDAFRRPTQITATNAGPERVVTPQQAFKFVIRSKLSTEETIVLDEKKTVEKTVEKPIEKPVETPVTETSPATKSSLSDASTVASEADDRKRKRSEKDSAVPLASKKIHNQLQKWNQKKAELKQVQTEETESELPEDDFADLSMMACLLCQRKFKTKQDLERHQELSELHKKNLRDPVSVGKAQMKKRYVKSKTEQAEDQMVEQNYRNRAAERRQAFGQPDKPVLSEPKYRSSGAPVGQIRPRTDVDTTMGLRHVEKVASVKTPLAEDNVGARMLKQMGWRRGEGLGKDGSGIVDPITAQQYAQGAGLGTAYAKRDISATAGSDSYKDRVKEMARRRFEEAP

SEQ ID NO: 3782 - protein, 613 aa, Clitarchus hookeri
MQACYYRRSYVQLAWDSKICRRRTMDKLVSNIVGTNHEKKTAVFFGDPLVSKTKFASGNNRPACAELLGAFKRNERCKVFETDEYLTTRSCSVCFDKIPIPPKHKTSEIKDPEKRQKNKTHEHRFQVFPNCKIVWNLDVNTARNIILVGLGIVYPHWNEEQSPDEFVCPAEFRPLHGLKYKQVWLPAGGKITSSPGDEIGALPAQWENTKFKGRFILVGENPMAGIWVRNPELDYILLEALSNMHHACLKLEMGGGSLTIVTSYFQPRDPLDRHLSQWDLIVQRAKEQVHYHWRGDEQVPDREKSIGCEYTRSPGDLLVVSPCYRIVSGRNRSDGACSRTYRDWIVSDELDSDHKMILFTIRWNGSKGNRPARPRFMTARASWPLFDKVLLGKVERYRHDHETMSTNERARSLVRVITDACKETIPQVSRKVPHHPWWDDELELLRRNVNRSRKQFMRVYEPEERLRAVQRYNILRGEYRRKIRKKRQQAWRELVTDRGNEDPWDLVYWMVTGKVQSSEELPALEHDGQLLQSFEENARHLMKVLLPDDDRIGETEYHQELRNTMEMEISTEDTAPFSLEELNLKVYRITTEEGTRSRRTDRGLGWLLARTRT

SEQ ID NO: 3783 - protein, 852 aa, Tetrabaena socialis
MPPKKGALSKDTLAQICAVHGLLPPLLPDEEDRATRQDYLGLALEHGLVSELEFTRSRAVEHVTLKRYLHSMVKDETFLTHLNDYVTQSSLIRAAGSKLANLFAVTAYEQGWLDDESTYEEDDDEAEAEAPKAPNAKTFIDKTLLDQTFIKYCMLPFKSALSQANALIDAVVPPHAGLAAVWQQHQDVLAPLYPAADDLRFINWDQALSDMAREYCGALKAHVVTHLPARVRSLFRARIEMELGGHFRKDPASGRSTLTTAGGEACFTSDAYAALLAGPKNSMRLPASVRHLVVELRDRCGLTGTCRLDKITKLTPRLFKLHIDLSREAVRRGEKGWSACPVISTSRTFAYIDERVAEQLLEANGKCMNGVRYEQRPESQARLSLLAWMFGTHKHAWEAANKDARRIHKANKSRKKRKQKSRCGYGRFPKREHTIKSVATDGVALCVILECPRTVQPYASSSFSSSSTTSTTSSSPTTASAFLASLRPAERRDLVKYSEDPGRANISQTLVEKFDGEESHGSGTQARLTRASYLKRTLQKRRQEEELLRKRENPLLRLGIDHLGNGGGCTWCTTDLADFRRILDRNLTVHDILAEEYVYGDWYARWKMLLWRRKRSVLAQYYSGLIRKNAAKGAPVVFGRGDGGFAATGRGEQSVPTSAVGKAILRCQGSLKTRNPKFLAQSLDEKRTTMCCHRCGHVLFDVQGDNGRPLRGVKECRQCWVHEGGAGVRYWCQMIRPAPGEGKVEGGGGGGGGGGGGHDHHGTLRLIPDDKGEVLRRLKLCVVSQSDIPGHTSRLLNRDVNATKNLMRILDALLRNEPRPQYLQQRPRQRAIPQPPPDPDAEMGDVDDVVAH

SEQ ID NO: 3784 - protein, 589 aa, Tetrabaena socialis
MTCGVFKEMRAGATGAKEAEQEALEELEFELLAAAASTTTVADDATITAVKMKLNSFCKDSPRLRSQIQALVLSMNRLLGEAYAFATFHILHLHDCGMYPAIDRNFFYRCLVAVSANNSRPATLGPELVNSRDVYHALRPLQGSGSQPVNTVGYAQVLADLSIVMATMAGNHLWENLEKRIFNYLKMKYPGQLMGDPLRKKVVEALVRKPLVCTADLFQLSPSVPPDSAAAERLRHARAVADELRVLLPLPSGDHYQTRAHLTIPLYIKMLQEIEEARAAAAAAAAAATNLTAGKTVRGRVXMMQEMVPLIASYRQPLSDAELARARATSGGTVVGVDPGVTDVATVATLEGETRRYSSARYYERSKINLSNHRTRKWNAETRERVEGLPSARTASVAEYADFVQRYLVVLPELLQHRAAKGYRNMRFLRYVHRQESIHEICEVIAPREGGLVVVGFGDWRGVGTTPIRRRCSGPLQDIKKHLQKQAHVRLVIIDEYLTSRGCHGCLNRLTNMRAAPHTHGPGKERVQGATTHVHKVLHCRPSSQAAARSCCGTTWNRDVNASKNILLLTMLRLKGYQRPPELSRGHQQ

SEQ ID NO: 3785 - protein, 475 aa, Tetrabaena socialis
MVNAIRSRVVAASRRVVLASIALNLLVREVFDRQPDATLDIRDETTLRQFMLGTASANKPDARVADIFLRNPGLLHEVSDRHLSDRNIYSAAAKKLGTNLRNHLVVNLRRVVNKALADVPNDAERVLMLYTLYGWKGGPRKKIKPPKKAKTSSSVAPTAEIAPEPPPLLSAPQLDFIREKDAEEAEEAADDGGNEEAPKAKSKPRPTPEQLSGSRVVVIDPGRTNIVYAVEVPPEAPPKIYRLTRSQYYQESGVVRGSQRAARWLRGVKEELAQLSAASPKGASLHLFQAFIATYLETCEVRWTEALKTRWAQQSLRLYGGKKRVLSRFFNEIARGQGGADSRPVVIAYGAAKFAPGGKGELSVPTSGVFKACQERFPTYLVDEFRTTKIHHVDDSLLQGVGERRWKGDNVKTVRGLLWCGSTNEKKSKFINRDFNGAMNIRRCFVSAERPAILDRSKCQGRLQFVRTGRVIRMK

SEQ ID NO: 3786 - protein, 579 aa, Tetrabaena socialis
MLQLHHHPPHIELXNIRQHFQQYVCRTAGVLLKPTICRSEDVRTFADLSKARKAYWRSQLRHAYEDILQHRHGVAMQSHATLQPTIKRFRTRLVPEQIVPGRSVDRDLNSTTRCYVYLGFMARMSRFLEALGQSKLPSPLPLKTSFIPAHYAIDTTSLCHLLFKGKTHLKEFSRYFEHKVPTGFPLPGLKNMANICSSLNELSGRPCTPKEEELFKDAIWTFLAHFKNRKTKQLNPLCGVGRDKHCSSLKFDHSISTDGYAVTLIVTGRELRGRKAYFSVTRDRREKSRMDPLESVPMDDHGYPLLTARTAQAVKEWLAAKHPGAGTPGGDPGKGVLLQMVDSATGRTLRYTAKQRAADTLSGMRHKKLQAARHKSLATVCGPLRAPGIHMSYPNVARIESNLLRKVSPRAASLGHFREYIAVRSSCRKHMEVAYGDWMVYRWARFLAWTRRQLSVARFAAKIKETFGKNGQPVIIMYGDWGRRPNLKNQAPTPGIGLRKQLAMLGILSVSVRETFTSSYCPRCAAGVEHGKGHYHLLHCTEQQCSKWYPRDVLGALNIQAKARFLIEHPGTPHPQFHS

SEQ ID NO: 3787 - protein, 750 aa, Prototheca cutis
MLSWNVEFWTDRMRLVSVVTLEYVLRKLEGGEAYTRHLNTHKRSSALGLPAASLEACWMGEDDAKDIAERTWNDLATGIRRKVHGTDDQARRRGQLIARIAPRALENALVQAAEKFGPGWEDVFADLVPVIRRCGADVPSPGTVQMSSDTDAAQVGAEPETLQMVPKMVVPHVPRTEAGPDQGEGAGQGAQQATSARSGRRRIGEWQGNGRLHWPAGKVERAMPPGLDMLSTHDPDGVVRLAYELLAIFKHCGDAGRPVQLPKADWCAIIRPIVLALMWISTEADKLRLLATVSKFMWQTRRWKQTFTVLPICRSSARHIILDARSLWLLCQQAGIEVGTRDAFAARGAESWRGLFNFPSTWFASDQCGRARMRKRFVGYATTDGVALSLALERGGSGSDGEQGGRVPWHVAKKARRRAAAKEAKQASWDAKQAAKKAQAATKKAKQKADREHAKKVLGGGXCSLGIDPGRKVILTCNYGEQKGDTVCMTTKEFRHNAHFNKNRDTHLRLLRENKDLWDVVENVPWLATGRAQDVRDHIDYMFQPFDGECTRFDALLDVTCSYKWRKAAFDVYMMRYMAMDKSIKDVIACTGHQPSRLVVFMGNASFRQNSPGHPPSLGWRRWAKRMREAHGLLVTEVDEFRTSQARAGVVVHICSACETHARLGGCKTARNQYAILKCQSCGVVWNRDVNAAGNIRHLGEALVLTGKRPPPFDRNTKLIPLACPLPRRSTWYDLITKILRWPWSAEQHH

SEQ ID NO: 3788 - protein, 711 aa, Prototheca cutis
MDRDFWALGREPPRDGITTVKGSVLVAWQRCHHAPLENFVLVVDHVSFHAWHFSRLVILEEYEAGRDVPRLIRREFFQEVFLWLTVCERRKPQTERTVDYRVTLARYWPKFLELFCYRAPVFQYAPTKIATYWGDARCRQLLSNVKVHFGEHVRGTVNLLLDMKGRRHEVLEQASAEQWDRQRRIEALRRLYDPVTRVKQALGRLEPAVEGLGPAHQAVYDEMLRVLRPAYWPGREFKKGTLYYDVKLHAREHVVAMIALSRFRDEQELRLFQALPLRRSHVPAAVEFDNQIVATHILGGYVLGQWSDNKTEIWERALRGWRREIQTVGGKLFSGHGSTNAVSCSYTKKPLGHAAARCVSRRFHAEGLKYVDGLGREELRQLPKTVVIDPGRRVLMSCMREDSKPGKGQRKTMGITAKQWRQWTQTYKVLGWINQRKTAKVRECERRLGEEAPNGHQSCTVAGYTRYLRALAQVRPTLAEFYKKPIFRKLRLWQYIRRQKADAKVVQRMRKFACGATLVIGDCSPPMARYHEPMPHFGLVRTLVKAGFSALLVDEYFTSQTCPGCRNRSLEKFKRVPNLRKRGKRACKNGRECKSERGCKNGRECKSERGCKNGRNGKKDRKRIKEKRKRVKERRKRDNAKLPTMLCHGLLRCTNCKLKDGRPRLWNRDVMACLNMIIIVQSLRETGKRPAEFQRPEGHRRSKKPLESPAS

SEQ ID NO: 3789 - protein, 417 aa, Prototheca cutis
MWISTEADKLRLLCEVSKFMWRTRRWKRTFTVLPVCRSSARHIILDARSLWLLCQQAGVEVGTGEAFRARGPESWQRLFDFPSTWPQRKPRRPRGKPSGRQTEHAKKVLGSGGCSLGIDPGRKVILTCNYGEQKGDTVCMTTKEFRHNAHFNKNRDTHLRLLRENKDLWDVVGNVPWLATGHAQDVRDHIDYMFQPFDGECTRFDALLDVTCSYKWRKAAFDVYMMRYMAMDESIKDVIACTGHQPSRIVVFMGNASFRHNSPGHPPSLGWRRWAKRMREAHGLLVIEVDEFRTSQARAGVVAHGWGPGWMGARRELGDQICSACEAHARLGGCSTARNKYAILKCDRCGVVWNRDVNAARNIRHLGERLVLTGKRPPPFDRKTKLAPPACPPPRRSTLYDFITKTLRWLWPAEQHH

SEQ ID NO: 3790 - protein, 253 aa, Prototheca cutis
MYCMHEDSSHKKGRRRTMRISSREWAFLTRSRKFRRLLRRLMTKGVRKALQRLAAEAPNGARACTVADFLAYLRVFGQVEATLSKHYSKPIFRKLRLWTYIYRQKAYAAVIARLRKFANGATLVVGDCSPGPARYHEPMPHXGXLRALVKAGFXVVLIDEFRTSKRCPACXHEECTVETFLRVPNPRPYRREQTPEVVCHGLLRCTNEKCRPPNGEHRLWNRDLMACLNMRHIVQSLRKTGKRPDRFQRPALQ

SEQ ID NO: 3791 - protein, 253 aa, Prototheca cutis
MYCMHEDSSHEKGRXLTMRISSREWTFLTRSRKFRRLCERLMTKGVRKALQRLAVEAPNGAKACTVADFLAYLRVFGQVEATLSKHYAKPIFRKLRLWAYIYRQKAYAAVIARLRKFANGATLVVGDCSPGPARYHEPMPHVGLPRALAKAGFKVVLIDEFRTSKRCPACEDEDCTVETFLRVPNPRPYRREQTPEVVCHGLLRCTNEKCRPPNGEHRLWNRDLMACLNMRHIVEHLRETGERPDRFQRPAPQ

SEQ ID NO: 3792 - protein, 444 aa, Prototheca cutis
MDEDCWGLGKEATRGTMSTVKSSVRETWQDEHHSPLEGLVMKTHHVTSYAALFARLLILQEFERGNVHRLPEMASDKFLAQVFFSLVVYRQNSANCSRDTLLMRLRLSAALPKFLQLTGYEPPSFRSPNRIAVYWAEGWCRSILTNIRLHLGEHLRGTVNLLLDIKARRXELLEKAKEXNWXADRRRETLDRELYEPVRRIKAGLGRLDPAVKDLDAAQQAVYDRLLALLRSAYRPEHRFKKGTLYYDAPNGHKACTVSAFSDYLRVFGQVEPTLTGYYARPIFRTLHLWSYSSRQRAYAALVAKLRAFANGATLVVGDCSPGAARYHEPTPSVGLLRVLVKAGFDILLIDEYCTSQFCPGCEKRSVKTFLDVPNPRPHRREKNPTVRCHGLLRCANCKVKDGRSRLWNRDLMACLNMLLIVQGLRETGKRPERFQRPKPKKSS

SEQ ID NO: 3793 - protein, 763 aa, Prototheca cutis
MSTVKGWVGAAWKEDCHKNLETVVRKTNHAGPYSVHFVRLVVLEQLELGNVGCIPELVSEKFFTEAFLSLVTYGQQKAKNEDIIRFRKLLAAYKPKFRELTLYQAPAFKNPNRIATYWGEAWCRATETNVRVHFGEHLRGTVNLLLDVRARRKELLEKGKEENWDGKKRRDVLHRELYGPGQRIKAGLGRLDPAVKDLDAAQQAAYDRLLALLRAAYRPEHRFKKGTLYYDVQASPREHVAAMIALSRLRAEENLPAFQAVPARASFVPGAVEMDNQAAAMNVLGWRRVPKATEQDAVWKNGLLLPKRREIKDAAGGRKHCGHVYTDGRSCCYVKKDPKQTGKGRHKRPECGGGGAKGGGKCGKGGNPAEPKRQKLPDGRCGNVSDDASKVGDSNDSNDSNDSNDSKGDAPERRSGGGEPKGLDSSAEREVAAGISARTNTGAEASTSGAPPPPSHPGAQPARRRRATNKRAGLEGLQYVEDVDPAVLRTLKLVFIDPNRRDLLFCLHEDSRSGRKHWKIMRFTSNEWAYWTRSRKLRRLRQALMTQEVRACERRLVMEAPNGHKACTVSAFSDYLRVFGQVEPTLTEFYAQPFFRDARFWAYRNRQKGYAALVAKLRDFAKGATLVVGDCSPGAARYHEPTPSVGLLRVLVKAGFDVLLIDEYCTSKFCPGCEERSVEPFLDVPNPRPYRRAQYPTVRCHGLLRCANCKVKDGQSRLWNRDLMACLNMLLIVQGLRETGKRPERFQRPNKGKNNKDNDEKKS

SEQ ID NO: 3794 - protein, 661 aa, Prototheca cutis
MDEDCWGLGKEATRGTMSXVKSSVRETWQDEHHSPLEGLXMKTHHVTSYAALFARLLILQEFERGNVHRLPEMASDKFLAQVFFSLVVYRQNSANCSRDTLLMRLRLSAALPKFLQLTGYEPPSFRSPNRIAVYWAEGWCRSILTNIRLHLGEHLRGTVNLLLDIKARRXELLEKAKEXNWXADRRRETLDRELYEPVRRIKAGLGRLDPAVKDLDAAQQAVYDRLLALLRSAYRPEHRFKKGTLYYDAVPVRASFVPGAVEMDNQAAAMNVLGWTGAPGSADQEEIWXEGLLKRGIREIKDLGDRQFCGHVYTDGRSCCFIKKRPSLTGKGRRKRPASAADGSNAAAADSGAANVGDALHAPGDAXXRKTRKRRQRRGMEGVRYVEDVPPEELRQLKLVFIDPNRRDMLFCMHEDSQPGKGKRRTMRFTANEWAFLXRSRKYRRVRREMKPPAVFACERRLVMEAPNGHKACTVSAFSDYLHVFGQVEPTLTRHYARPIFRTLRLWSYSSRQRAYAALVAKLRAFADGATLVVGDCSPGAARYHEPTPSVGLLRVLVKAGFDVLLIDEYCTSKFCPGCEERSVEPFLDVPNPRPYRRAQYPTVRCHGLLRCANCKVEDGRSRLWNRDLMACLNMLLIVQELRETGKRPERFQRPKPKKSS

SEQ ID NO: 3795 - protein, 212 aa, Prototheca cutis
MTKGVRKALRRLATEAPDGARACTVADFLAYLRVFGQVEATLSKHYAKPIFRKLRLWXYIYRQXAYAAVIARLRKFANGATLVVGDCSPGPARYHEPMPHVGLLRALVKAGFSVVLIDEFRTSKRCPACEHEECTVETFLRVPNPRPYRREQTPEVVCHGLLRCTNETCRPPNGEHRLWNRDLMACLNMRHIVEHLRKTGKRPERFQRPAPQ

SEQ ID NO: 3796 - protein, 789 aa, Prototheca cutis
MGEDDARGIAEHTWNDLATGIRRKVRGTDDLARRRGQLIARIAPRALENALVQAAEKVGPGWEDVFADLVPVIRRCGADVPSPGTVQMSSDTDAAQVAAEPETLQMVPKMVVPNVARAEAGPDQGEGAGQAAQQATSTRSGKKRIGEWRGDGHLRWPAGKVERAMPPRLDMLSTHDPDGVVHLAYELLAIFKRCGDKGRPVQLPKADWLLRENKDLWAVVGNVPWLATGRAQDVCDLIDYMFQPFDSERTRFDALLDVTCSYKWRKGAFDVHARRRAAVKEAKRASWDAKQAAKKAQAAVKKAKQKAYREHAKKVLGGGGCSLGIDPGRKVILTCNYGDGKDDTVCVTTKEYRHNAHFNKNRDTHMRLLRENKDLWAVVENVPWLATGRAQDVCDLIDYMFQPFDSERTRFDALLDVTCSYKWRKGAFDVHVMRYMAMDKSIKDVIACTGHQPSRIVVFMGNASFRHNSPGHPLSLGWRRWAKRMREAHGLLVIEVDEFRTSQARAGVVAHLVGNIPGEGMGAGQSKDNHAVGANGASELSTSEQSSCPVPESVRGKAVYNVYNQRIDGLPAPKIDILDPSNNMPAEPNQQPAPGQKKLLSTERVVSNIPKGNTEGTWVYPSPQMFYNALKRKGKGDDVTEDDMDSVILAHNSMNELTWGHVLVWESLHRSPCAKASSSQRRGTTPSCSPIARMRSWFGGQLPFDRHDWYIDRCGKEVRYVIDFYFHDELAGRPEAFELNVRPALDSFEAALDRAKMQIYTTFAKYGLPCPVTGHAGTIGVAAVEADKN

SEQ ID NO: 3797 - protein, 673 aa, Prototheca cutis
MGEGDARDIAERTWNDLVSGIRRKGRETDDQARRRGQLIAGIAPRALEKALVQAAEKFGPGWEDVFADLVPVIRRCGADVPSLGTVQTSPDMDASQVGAEPEALQMVPKMVVPNVARAEAGPDQRESARQGAQQATSARSGRRRIGEWQGNGRLRWPAGEVERAMPPRLDMLSARDPDGVVHLAYELLAIFKRCGDEGRPVQLPKADWCAIIRPIARALMWISTEADKLRLLATASEFMWRTRRWKQTFTVLPICRASARHIILDTQALWLLCQQAGTEVGTRDAFVAGGPESWRGLFDFPSTWFASDRCGRARRRKRVVGDATTDGVALSLALERGGSGSDGEQGGRVPWHVAKKARRRAAAKEAKQASWDAKQAAKKAQAATKKDKEVVDKAHAKKVLGGGGCSLGIDPGRKVILTCNYGDGKGDTVCVTTKEYRHNAHFNKNRDGHLRLLRENKDLWDVVGNVPWLATGRAQDVCDHIDYMFQPFDGERTRFDALLDVTCSYKWRKGAFXVYMMRXXAMDKSIKDVXACTGHQPSRLVVFMGNASFRHNSPGHPPSLGWRRWAKRMREAHGLLICSACKAHARLVGCSTARNKYAILKCHSCGVVWNRDVNAARNIRHLGERLVLTGERPPPFDRKSKLTPLACSPPGRSTLYDFITKILRWLWPAEQHH

SEQ ID NO: 3798 - protein, 529 aa, Prototheca cutis
MSILLIIFVLRQCSSGGVPELDIREIRRGLAYLCGNNGYRHQGEDPQXVQGEFAKFIARHFREHVRPEEGQCTLCNYNAQGYVTXLDRHIATHKPMAAKRHLAAALEACGMGPREAARIAAEAWKALKGAINEDTRGTIGEPAAWRIAAVVSDVVDRALRQIALAPGGQLDRIRGLPDGQADRLRALVAAMIDGASHVPVPMSDPASPPSSPGSAQVTPEPQTIRMMTNTGPAQTAPDQDAERRQDALEAEAAQPGGGAGRRWPQRPVVLDMPPRLDMLSRNDPDGAVILAYQLLEAFVQCRLAGRPVRLTKADWHRYMHTKLQKDHGLKSFLLGMPSLKTGREQGVVDYIDYLFRPYNIAYTFFEALLNVHCSYKWKKASFDVHIMRYKAMDAIIRRIIDHIVSATGVDPKNIVIVMGRANFRHNSPGHPPSFGWRHWTKRMREVHNLVVIEVDEFNTSQVCSNCLAASRLGNAPEARDNYAIRKCQNLDCGEEWNRDVNAARNIRYVALQILLTGVRPEPFNVSLPR

SEQ ID NO: 3799 - protein, 317 aa, Prototheca cutis
MFQQATAYERRQFYHAPNQDAKYWGEAQCAAVEANVLKHFGEHVRGTXNLILNVKDRRKELDARAHSSRQHDAESPEELEQLGKCVFIDPGRGDLMYCMHEDSSHKTGCRLTMQISSREWAFLTQSRKFRRLLRRLMTKXVRKALQRLAAEAPNGARACTVTDFLAYLRVFGQVEATLSKHYAKPIFRKLRLWTYIYRQKAYAAVIARLRKXANGAXLVVGDCSPGPARYHEPMPHVGLLRALXKAGFXVVLIDEFRTSKRCPACKHEXCTVETFLRVPNPRPYRREQTPEVVCHGLLRCTNEKVKIFISDAQQPPG

SEQ ID NO: 3800 - protein, 540 aa, Prototheca cutis
MFQQATADERQQFYHAPNQDAAYWGETQCAVVEANVRKHFGEHVRSTMNLILDVKDRRKEVDVRACREGWNRERRNETREGEVNGPARRIKEALGRLEAAVEGMDAAQQAKYDRLLQLLRNAYPPGYRFEEGTLYYDSKVNPREHVRAMIAMSRFRVEEGMRTFRAIPMHTSHVPGAVQMDNYIVAKQFLKDQKLANFSANLEFIWGTLLMPGRREIKDVSGNKFQGVSDGIDPPQQDRAGAQQPAARRRVVKRRGLEGLRYVDDLSPEELEQLGKCVFIDPGRGDLMYCMHEDSXHXKGXXLTMRISSREWAFLTRSRKFRRLLRRLMTKGVRKALQRLAAEAPNGARACTVXDFLAYLXVFGQVEATLSKHYAKPIFRKLRLWAYIYRQKAYAAVIAXLRKXANGXTLVVGDCSPGXARXHEPMPHVGLLRALVKAXFXVVLIDEFRTSKRCPACEHEECTVETFLRVPNPRPYRREQTPEVVCHGLLRCTNEKCRPPNGEHRLWNRDLMAXLNMRHIVEHLRKTGKRPERFQRPAPQ

SEQ ID NO: 3801 - protein, 917 aa, Prototheca cutis
MRFVSVVTLEYVLRKLEGGEVPAQLTKXEFRKALSYLCGKNHYGDEGPDNVNVAGELAKFIXKHYRSRVRPAEHQSRQCDLQAAQLYQAYTRHLDXHKRSSALGLLAASLEACGMGEGDGRDIAERTWCDLATGIRRRVRGTDDLARRRGQLIAKIAPRALEKALVQAAEKFGXGWEDVFADLVPVIRRCGXDVPSPGTVQMSSDTDAAQVGAEPETLRMVPKMVVPHVPRTEAGPDQGEGAGQAAQQATSARSGRRRIGEWQGNGRLHWPXGKVERAMPPRLDMLSTHDPDGVVHLAYELLAIFKRCGDEGRPVQLPKADWCAIIRPIASALMWISTEAHKLCLLATASEFMWRTRRWKQTFTVLPVCRASARHIILDTHALWLLCQQAGIEVGTRDAFRAGDPESWKRLFDFPSTWFASDRRGRARMRKRFVGYATTDGVALSLALERGGGASGGEQGGCVPWHVAKKARRRAAAKEAKQASWDVKQAAKKAQAATKKDKEVVDKAHAKKVLGGGGCSLGIDPGRKVILTCNYGEQKGDTVCMTTKEFRHNAHFNKNRDTHMRLLRENKDLWAVVENVPWLATGRAEDVCDHIDYMFQPFDGECTRFDALLDVTCSYKWKKAAFDVYMMRYMAMDKSIKDVIACTGHQPSRLVVFMGNASFRHNSPGHPPSLGWRRWAKRMREAHGLLVIEVDEFRTSQARAGVVAHVWICSACKAHARLGGCKTARNKYAKCDRCGVVWNRDVNAARNIRHLGERLVLTGKRPPPFDRKPELGAPLFAAHPPSPRRSTWADDGAALKTLHDANARFYNAFAKADLEAMGRLWAQSDRAQVLHPGCACITGYQPVMRSWEYVLSSGEMDIALKDVRLCIVDRVGWVTCLEVTKAEDHQGRVAATNIFLMDEQGDWKLTLHQGSIL

SEQ ID NO: 3802 - protein, 212 aa, Prototheca cutis
MTKGVRKALQRLAAEAPNGAKACTVADFLAYLRVFGQVEATLSKHYAKPIFRKLRLWAYIYRQKAYAAAIARLRKFANGATLVVGDCSPGPARYHEPMPHVGLLRALVKAGFNVVLIDEFRTSKRCPACEHEECTVETFLRVPNPRPYRREQTPDVVCHGLLRCTNEKCRPPNGEHRLWNRDLMACLNMRHIVEQLRKTGKRPDRFQRPAPQ

SEQ ID NO: 3803 - protein, 286 aa, Prototheca cutis
MPSTGGKTQCAAVEANVRKYFGNNVRGTMNLILNVKDRRKEQDRADTQQPAARRRVVRRRGLEGLRYVDDLSPEELEQLGKCVFIDPSRRDLMYCMHEDSSHGKGRRLTMRISSRDKHYAKPIFRKLRLWAYIYRQKAYAAVIARLRKFANGATLVVSDCSLGAARYHEPMPHVGLLQALVKAGFKVVLIDEFRTSKRCPACKHEECTVEMFLRVPNPHPYRREQTPTVVCHGLLHFTNEKCHPLKGEHSLWNRDLMACLNMRHIVEHLRKTGKRPLCFQCPKPQC

SEQ ID NO: 3804 - protein, 882 aa, Prototheca cutis
MARNFWGSGREAPRGAMTTAKASDCEVDGPRLLGRGREALKGVFTAAKASVLATWKRMFHGPQEQYVQKMHPVKQHASFFAALVLLEEDEAGSADFATRFVCPRFFAEVFLYMVSYSPRRKTRDDETTYFRARFQRSWPMFQQATAYERRQFYHAPNQDAKYWGEAQCAAVEANVRKHFGEHVRGTMNLILXVKDRRKEXDXRXRXEXWDRKKRNETREREVNGPARHIKEALGRLEATVEGMDATQQAKYDRLLQLLRNAYPPGYRFEKGTFYYDSKANPREHVRAMIAMSRFRVEEGMRTFRAIPMHTSHVPGAVQMDNYIVAKQFLKDSKLGSFAANLEFIWXTLLMPGRREIKDISGNKFQGVVSSDGISCSFIKKPPDAQQPAARRRVVKRRGLEGLRYVDDLSPEELEQLGKCVFIDPGRRDLMYCMHEDSSHEKGRRLTMRISSREWAFLTRSRKFRRLLRRLMTKGVRKAQQRLATEAPNGARACTVADFLAYLRVFGQVEATLSKHYAKPIFRKLRLWTYIYRQKAYAAVIARLRKFANGATLVVGDCSPGPARYHEPMPHSDGIDPPQQDHTDAQQPAARRRVVKRRGLEGLRYXDDLSPEELEQLGKCVFIDPGRXDLMYCMHEDSSHXKGRRLTMRISSREWAFLTRSRKFRRLLRRLMTKGVRKAQQRLATEAPNGARACTVADFLAYLRVFGQVEATLSKHYAKPIFRKLRLWTYIYRQKAYAAVIARLRKFANGATLVVGDCSPGPARYHEPMPHVGLLRALVKAGXNVVLIDEFRTSKRXPACEHEECTVETFLRVPNPRPYRREQTPEVVCHGLLRCTNEKCRPPNGEHRLWNRDLMACLNMRHIVEHLRKTGKRPDRFQRPAPQ

SEQ ID NO: 3805 - protein, 253 aa, Prototheca cutis
MYCMHEDSSHEKGRRLTMRISSREWAFLTRSRKFRRLLRRLMTKGVRKAQQRLATEAPNGARACTVADFLAYLRVFGQVEATLSKHYAKPIFRKLRLWTYIYRQKAYAAVIARLRKFANGATLVVGDCSPGPARYHEPMPHVGLLRALVKAGFSVVLIDEFRTSKRCPACEHEECTVETFLRVPNPRPYRREQTPEVVCHGLLRCTNEKCRPPNGEHRLWNRDLMACLNMRHIVEHLRKTGKRPERFQRPAPQ

SEQ ID NO: 3806 - protein, 709 aa, Prototheca cutis
MTDPDWLGLGQRKGSMTTVKASVLATWNPDLHDPLDEFVKKXHRVAKYASLFARFVFIVEYESGNVGVVRELACKGFFAEAFLWLISYDRQERTSLKTGEFRSHLERHWPAFLRLTGYERQPFKNAYTVARYWGEARCRDVLTNIXQHFGEHIRGTXNLFLRXKARRRELNTRADAEGWDRQARHDAXERELYGPARRIKTGLGRLDPTVDGLNATEQAVYDRLLQPLRAAYRPEHRFKXGHFYYDCKANPREHLCAMIALSCTRGSTGKRKFQALPVQMSNVPAAVEMDNLGVAKNILRCGKVLTSADQDAIWADLLQPGRREIKDVGGKTFHGHVYTDAASCCFVKKPPGLTGRGRQKRRSGDGDGGAGGAMRRVEEEPTGSSADFGEAPGAGASTSAGAGPPAVGAPLRGRPSAQRSGKRPGGITAHAGLEGLRYVDDLTPAELQQXKFVFIDPGRRDLLYCMHEDSTPEKGQRRTMRLTCNEWAFLTRSRKFRKLRERLRTXTVHDCEQRLAVGAPDGYKDCTVAAFSNYLQVFSEVEPTLTEFYXQAIFRKLRFWAHMYRQKAYAALIRRLREFADGATLVLGSSVPAVGRFHEPXPGIALVRALVKAGFEVLLINEHCTSKMCPDCEQRSVETFHRVXNPRPYRRAQQPTQLCHGLLRCTSGRCRRADGSYRLWNRDLMACLNMRLIVQSLRETGERPLRFRR

SEQ ID NO: 3807 - protein, 665 aa, Prototheca cutis
MWISTEADKLRLLCEVSKFMWRTRRWKRTFTVLPVCRSSARHIILDARSLWLLCQQAGIEVGTRNAFRARGPESWRGLFDFPSTWFASDRCGRARMRKRXVGXATTDGVALSLVLERGGSGSDGEQGDRIPWHVAKKARRRAAAKEAKQVLWDAKQAAKKAQAAVKKAKQKAYREHAKKVLGGGGCSLGIDPGRKVILTCNYGDGKDDTVCVTTKEYRHNAHFNKNRAGHLRLLRENKDLWDVVENXPWLATGRAQDVCDHIDYMFQPFDSEHTRFDGLLDVTCSYKWRKGAFDVHMMRYMAMDESIKXVIACTGHQPSRLVVFMGNASFRHNSPGHPPSLGWRRWAKRMREAHGLLVIEVDEFRTSQARAGVVASSKPHQGSRDQHIVFTTSDDGKSCGKTWQAHRVIQWGLTPLWSPALYWDTPRARLLLFYSESRKALTPGGDVKCMASTDLGASWSPPTLVWTHEASEECPKVTAAPPVVDAEGTWYLPVHLEPYGAFRTFNKTSHSELAAGEEDMPRTPPPTNATPQSLLVAADGRLLALFRTALGSVHRALGSRQAAEWTKPVATPLQNPNSKLATVCIEDQILAVHNPGKKDRSALAISLSTSAGAKWSHVADLDAQSQGTLSSPSMLVWSDDTVKVVYSVLGVGLRLLTAQLPVEHS

SEQ ID NO: 3808 - protein, 497 aa, Prototheca cutis
MRXKAEPAKRRRGLDGNAVPVPNSPHGHVTEAALGQAKKHEMHSEEEPAKRQRGSDGDGVPVPNSPREHVDEATPAWDTGDGQAGAGQPESRGAQNAPVREVILRPPPWPEVLTVHDPEGAARTAYDMLCRLAERHAVGVNVHLSADEQRELLRPIVEAIAGLTSQEDRLRFIYADALFRRDTGRPTFTLLPMCKWSARHIPLDANILYYVSKAAGKDVGTVEEFRPRYMEHVEATFDLSRVRLSLGADNSRSGRKHATGFMTTDGESLGITAERTTPHDGASTSSGEPTGDVAEASRRWRHGKGCLVGIDPGRTQVLTWAVGMDGPTGRMSGREHRHDTHAEKCCTHHEDLLRTNNLADFVHEVPSLKAAREEDVRAYFDYMSDERLDELLRVTCSRSWKKSTFDVYMMKYKMMDEIIERIIKDTGRLPREIIIVLGAADFGNHAPGHEMWAWRMRQHGLAVINVDEYNTSQVRWGRQVTPMHTQGPACWRFAAHQ

SEQ ID NO: 3809 - protein, 790 aa, Prototheca cutis
MGCYYAAFTRVLNEKVELHTGNMHLVSLFALLFTLIHFREVDLAELTSSEIYYALLYMFGQNKYGDEGPDNENVRGKLAKFIAGNYRWVVRPKPHQLQDCLYAARRYMADANKHIKDHKPLAAKAEMAAAMNACGMLQVHAARIAAKTWNAIGDMIRRNREAERGAQAGPPPGVGGLGDADADEDDRDEDPPARYRHIRPFDSQALERMIRQIASALGQDWAGIVPGLAQAIRGCGMYVPSPVTAPMTLNELPARVGAAEAEAVAMLPAERPAQNPPNQGTGSGQVAVRVPAAAQPGRRSRRRGGNRRRGWSGDWWGAPPPRGPVEMTMPPRLDMLVAGDSSGAVRLAYELREAFEKCKEAGRPVALSEADWCEVSRPIAEAVMWLSSQRDKLRLLCEVSKFLWETRRFKQAFTALPVCKWSARHITIDTKILWYTCREAGIPVGPLPGFHAQGVDAWRRVLKLDDGWCEPGDYRPGRTNRRFRRFAKTDGVSLCLLFDVLRPADGQEAGGGTQPAVAGLSEAVREAAKRRLLSGGSILGMDPGRKETWTYNVDDVVGQDGALSTRQFGHEAHYGNHRFTHIKLLRDNGLWQFACRVPSLMTGLAQGVRDYIAYIFRPFDGDRSCFQALLDVTCSTEWKRAAFDVHMNRYRAMDAAIKRMVDHTGLTPRQLVVAIGNANFRHNSRGHPPTIGWRRWAKRMRDIHGLLVIPVNEYNTSQVCSACNAALRLGDCPTATNKHFVRKCQNEACGVVLNRDKNAARNICYVAMGLIFNRVRPEPFDKRLPPLTRA

SEQ ID NO: 3810 - protein, 1451 aa, Prototheca cutis
MHESEVAESPRHDDGEHSGHDAQEAPRSAGRVDDPDTFLPPKLTKKKLEKLQEQYNKRGIVYMSRLPPHLKPRKLRQMLEPYGEIGRIYLAPEDARQRRLRKEKGSNSGKNFTEGWIEFEDKKDAKKTVAMLNGQLMGGKRRSSYYYDLWSLRYLPKFKWDQLTEEINYQKAVREQRLAMEVAAAKRERDFYLQQVDAAKAQTAMQERRQKKARARGCMDIDAKLAAEDVTGAVSKDRSSEVEEQPEKKVRKFGQRKAKADPVSAPEAPTVSQPLRPFTQNRSVYRTAGRALERRCLAPGSPDTVEAVVADSLDEDAEAQTPRLLGFTFQDVYYYLNIGYWSLLLLSVLTGNDFLSRIAQFETYTTTMFVASAVFSTFFGLKWWRDARRKLQAEKTNDWRALLRYAWNALFWLGFVLWYAVPPVNAVTEYAGTAGSIACVYGAALTLSSALMVGVYSFLGEPQLPRKLVMIGPYSIVRHPQILGNFLFIMGFSLAGGAVAATAAFLLSFAVYRITVVPREEKLMEDKYGAVYRRYMERVPAFRWGWVILGVVEGRWESRLSSPASSSLEGDAEEAASLLHTVIRLRRDAPQSTIPDALCQAFIKHYGQQDHVARVALLRRLATEFGGPSDDITAAMRRYDQALAQPGGIAALVAMRADSLRALRECPSRSGALRALAEALRGQLFALFGPGLLRVERLSWEGSPTALLERVMAAEAVHRIASWDELRARLGPRRRVFALTHPGLPADQPPSNPAVAVFYSISNSQPGLAGIDMGNFLIKKARGGLALDPVAGFHVRNGAECWRLNWRADASPAGLARSHGIMVNYLYDLPHVDANNRAYVVSGAIPASEQQDCEVDGPRLLGRGWEALKGVFTAAKASVLATWKRMFHGPQEQYVHKMHPVKQHASFFAALVLLEEDEAGSADFATRFVCPRFFSEAFLYMVSYHRLKTRNPETTFFRARFERSWPMFQQATAYERRQFYHAPNQDALYWGETQCAAVEANVRKHFGEHVRGTMNLILNVKDRRKELDARARREHWDRKRRGETCDQEVNGPARRIKEALGRLEAXVEGMDATQQAKYDRLLQLLRNAYPPGYRFEKGTFYYDSKVNPREHVRAMIAMSRFRVEEGMRTFRAIPMHTSHSDGIDAPQQDRAGAQQPAAQHRVVKXRGLEGLRYVDDLSPEEXEQLGKCVFIDPGRGDLMYCMHEDSSHKKGCRLTMRISSREWAFLTRSRKFRRLCERLMTKGVRKALQRLATEAPNGAKACTVADFLAYLRVFGQVEATLSKHYAKPIFRKLRLWAYIYRQKAYAAVIAXLRKXANGATLVVGDCSPGXARXHEPMPHVGLXRALAKAGFKVVLIDEFRTSKRCPACEDEDCTVETFLRVPNPRPYRREQTPEVLCHGLLRCTNKECRPPKGEHRLWNRDLMACLNMRHIVQTLRKTGERPDRFQRPAPQ

SEQ ID NO: 3811 - protein, 760 aa, Prototheca cutis
MIAVICSFVLHATRIWLLLGAIANAFVVRVFAAVGGSLPNLEHNQYRRLLSYLDGHNHYDPSAVDADRVNGELAQFCFANFKGRVRQVTDLSKVNSYLAFDYERAVNRHIWDHFLMSSRSFSRALLEAGGMVSRDAARDMVWQVIPEQTVASGQAGAGPSQERHDPATGAHLPWPSVRASSNTGPAAQAALGRAKKREMHSEEEPAKRQRGPDGDDVLVPSSPRGHVTEAALRRGTKREMRSEEPAKRRRGLDGNAVPVPNSPRERVAEAALGWDAGDEQAGTGRPESSGPQCESVHEVTLRPPPWPEVLTAHDPDGAARTAYDMLCRLAERHAVGVDVDLSVDEQRELLRPIVEAVAGLTSQEDRLRFNYAGALFRRDTGRPTFTLLPMCKWSARHIPLDATILYYISKTAGKDIGTVQEFLARYMEHVEATFDLFRVRLSLGADNSRSGRKHATGFMTTDGESLGITAERTTTLTPPAPGPAAARGDDGASTHDGASTSSEELTGDVAEARRRWRHGKGCLVGIDPGRAYVLTWAVGMDGPTGRMSGREYRHDTHSEKCRIHHEYLLRTNNLADFVHDVPSLKAAREEDVRAYFDYMSDERLDELLRVTCSRSWKKSDFDVYMMKYKMMDEVIERIIKDTGRLPREIIIVLGAADFGNHAPGHEMWAWRMRQHGLAVINVDEYNTSQFCSVCRRPPRLVDSKTARCPYHFRHCLNCHVDRDRDVNAARNIWYVAMCLLTTNARPYPFRKPLDSEHRED

SEQ ID NO: 3812 - protein, 1614 aa, Prototheca cutis
MLSWNVKFWTGHMRLVSVIAIAYVLRKLEGGEVPAQLTKEEFRKALSYLCGKNHYGDEGPDNVNVAGELAKFIAKRYRSRVSAEPKTLQMVPKMVVPDVACAEAGSDQGEGAGQAAQQATSARSGRRRIGEWQGNXHSRWPAGEVERAMPRRLDMLSTHDPDGVVCLAYELLAIFKRCGDAGRPVQLPKADWCAIVRPIVSALMWISTEADKLRLLCEVSKFMWRTRRWKRTFTVLPVCRASARHIILDARSLWSICQQAGIKVGTQKAFRTILTCNYGDGKGDTVCVXTKEYRHNAHFNKNRDTHMRLLRENKDLWAVVGNVPWLATGRAQDVRDHIDYMFQPFDGERTRFDALLDVTCSYKWRKAAFDVHMMRYMAMDESIKDVIACTGHQPSRIVVFMGNASFRHNLPGHPPSLGWRRWAKRMREAHGLLICSACEAHARLGGCSTARNTYAILECQSCGVVWNRDVNAACNIRHGDAAMEALQSHDNPFLATTMLLLAEKNKGPESAFYPHIQSMPTTHNCLFSWTEDEFAHLRNTDIDPELPGAARGMFEAAEELGTQFPTVWPGLSYEMFCWAAGMVQSRTFHLRASNWVTNEETEGSDLYMLPGIDMVNHTSHPEKLSVDLEFVPDVRLGGRVVKPGHFAMVTTKEVARGDELLYSYGELSDAELLQTYGFVEREVHPSATASVTIQELVAGCLGSAAMSEREQDRAERALEAIERRLAPAGLFELALAGELPPRALLLAAQALLAREPDLDRQIQNLLLWDPSDPESPPPFPAPPTAEHLSAIVPAVRAARARLERAATDTAAAAAASMEDSLQQRATLAAALCRAQARVLAQAERALAMAALAAEGSEAGFPGKPVVLVALQWTRLSNVAGTRASVLSTPDITSHSLNISRGWPPLLTNGMALGEEAAGERYAGSARCAEAGTTGGAAMTSLPGSLSPRATLSEQPSLCSEVEAEPSGEPLSCSAGFVDDFGVSCAKGRPAGAGNASVAPTPRAFFPSDPAAYLGAAATGSEWDDEAAAVSYGGDADYDWEQAEAGDNCGDDDEDDEGPGSFGYCTNCTAPLWSDVCPDCGYALGLTPALFDPGHGPDSCSGMTLAEAVAXRAXCPATSTPPVVVAYDEAMXLHEEPGPPSSGVHPERPDRIRAAWARLCSSQLTGRCVRLPSRAATDEELERVHSRALVSGIQDLSSWHAARAKQAGAGAEKGGLGEGPSGASSDGSSGALDLSQARDTTAESHDNAADVDAATAPPPVTPSPPMRLPSDTYACAATAAAARLGAGAAADVASAVARGEARAGMAIVRPPGHHAESGSAQGFCFFNNAAVAARAAQAAGAARVLVLDWDVHHGNGTQEVFWRDGSVLYVSLHRHEGGSFYPGTGAAREVGEGPGLGSTVNIAWPCSGLTDAEYEAAAATIILPIAAEFAPDLIVLSAGFDAAAGDPIGGCHLTPGLYARLTRLMASVAPCAAVLXGGYNLAAVAACTEACVRALMGEHSCAGGGLVPGMGVAAGANVPGFGGFGEASTAMPTLPGSAKLSLGRCDHDNRHFNDTRSIPTWHPATPAVQRHKARVVRHEIWRAIAETAAAHAPYWACMAGLDAVLLRGAQPWTGR

SEQ ID NO: 3813 - protein, 364 aa, Prototheca cutis
MFQQATAYERRQFYHAPNQDAKYWGETQCAAVEANVRKHFGNNVRGTMNLILNVKDXRKELDHTDAQQPAARRRVGKRRGLEGLRYVDDLSPEELEQLGKCVFIDPGRGDLMYCMHEDSXHKXGCRLTMRISSREWAFLTRSRKFRRLCERLMTKGVRKALQRLATEAPNGARACTVADFLAYLCVFGQVEAALSKHYAKPIFRKLRLWAYTYRQKAYAAVIARLRKFANGATLVVGDCSPGSARFHEPMPHVGLLRXLVKAGFNVVLIDEFRTSKRCPACXHEECTVETFLRVPNPXPYRREQSPEVVCHGLLRCTNEKCXPXNGEHRLWNRDLMACLNMRHIVQSLRKTGKRPDRFQRPAPQ

SEQ ID NO: 3814 - protein, 687 aa, Prototheca cutis
MDRDFWGRGREALKGVFRAAKASVLATWKHMFHRPQEQYVQKMHPVKQHASHFAALVLLEEDEAGTADFATRFICPRFFSEAFLYMVSYHRRKTSNDETTYFRARFXRSWPMFQQATAYERRQFYHAPNQCAAVEANVRKHFGEHVRGTMNLILXVKDRRKEXDXRXRXEXWDRKKRNETREREVNGPARHIKEALGRLEAXVEGMDAXQQAKYDRLLQLLRNAYPPGYRFEKGTFYYDSKANPREHVRAMIAMSRFRVEEGMRTFRAIPMHTSHVPGAVQMDNYIVAKQFLKDSKLGSFAANLEFIWGTLLMPGRREIKDXSGNKFQGVDNSNDNEDGGGSTRAARVEAEGATGSRVVRGRAASITAGTAASAESDGIDPPQQDRAGAQQPAARRGVVKRRGLEGLRYVDDLSPEELERLGKCVFIDPGRGDLMYCMHEDSXHXXXXRLTMRISSREWAFLTRSRKFRRLLRRLMTKXVRKALQRLAAEAPNGARACTVADFLAYLRVFGQVEATLSKHYAKPIFRKLRLWXYIYRQKAYAAVIARLRKFANGATLVVGDCSPGPARFHEPMPHVGLLRALXKAGFKVVLIDEFRTSKRCPACEDEECTVETFLRVPNPRPYRREQTPEVVCHGLLRCTNEKCRPPNGEHRLWNRDLMACLNMRHIVEHLRKTGKRPDRFQRPAXQ

SEQ ID NO: 3815 - protein, 423 aa, Prototheca cutis
MVFWTNRRTKSTSAREFPFWKAALSRASWHSNGPPTEGAEGCQVLGEAQCAAVEANVRKHFGEHVRGTMNLILNVKDRRKEVDARARRERWDRERRNETCDQEVNGPARRIKEALGRLEAAVEGMDTAQQAKYDRLLQLLRSAYPPGYRFEMGTFYYDSKVNPREHVRAMIAMSRFRVEEGMRTFRAIPMHTSHVPGAVQMDNSIVAKQFLKDSKLGRFSANLEEIWGTLLMPGRREIKDVSGNKFQGVHYAKPIFRKLRLWAYIYRQKAYAAVIARLRKFANGATLVVGDCSPGPARFHEPMPHVGLLRALVKAGXNVVLIDEFRTSKRCPACEHEDCTVETFLRVPNPRPYRREQTPDVVCHGLLRCTNEKPAPEWRASSLEQRLDGVPEHEAHRGAPAEDRQAAGPLPAPKVAVKSILEE

SEQ ID NO: 3816 - protein, 380 aa, Periplaneta americana
MERLKAYKFRIYPSEEQEIFFAKSFGCVRKVYNLMLDDRMKAYEETKKDSSKKMSFPTPAKYKKEFPFLKEVDSLALANAQLNLDKAYKNFFRDKSVGFPRFKSKKNPVQSYTTNNQNGTVALIDNKFIKVPKLKSLIRIKLHRQPKGIIKSATISYHASGKYYVSLLCKEEMVELPKTNSAIGIDLGITDFAILSDGQKIDNHKFTSKMEKTLKREQRKLSRRALLAKQKGINLFEAKNYQKQKRKVARLHEKVRNQRTDFLNKLSTEIIKNHDIICIEDLNTKGMLRNHKLAKSISDVSWSSFVTKLQYKADWYGRKIIKIDKWFPSSQICSECGHKDGKKSLEIREWTCPICHTHHDRDINASINILTEGLRTQALA

SEQ ID NO: 3817 - protein, 1200 aa, Eudorina sp.
MDDSQQQTTTKRKRPDFAKKLQERKTSTETVVKCSLRSVLIGSSQERDRAVQAIDQRVVAYSQRVVLGTRALNLLVRSLFDGGVASDAIEGLTLDIDFTDQTFLRQLLLGTGNVHPRLVALFGAHPNLLYDKDCRHTSDRNIYSDASRALGTNISNHLKGNLVKVVKQAVYQCAPGSQEQHVEMLFRICCGWTRTPGHKKKKPAAKQPSKRSKQADAAAAAPATAEAALELSEEQLAFVRACRGILGLSDDGTLNNKWLDCKRNLPHMLKFFVHTLRLLEARAAAAPAAAPATPLFNLLPMCSRKRHFITIDTSSLHGVARDAGRVSASCTMDAFCANGSSHWGSILRVDKERLPSSSASPPTTIAATNCRVVGIDLGRTNILFAAEELPDGRTRTWRLTRAQYYRESGISAANLQTQRWHAVGSIRDALDALSKVSSKGSSVESFTAFLAVDLAVGWVVMAEHLKRRWAQQRFRLHGGKKRMVDRFFNRLERAGDGRLLVVAYGACKVAPGGRGEVSVPTGRMYRECARRHPTYLVDEFLSTCMYHADDSIVLDKVAVKKITKEGKEVTVAVDDGVRVFFAHGGFRGDQGRAVATAAAESVLTDMGYFVGPTKVNCDSQSAIKVIKNPVVSAKSKHIAVRYHLVREQVLCGSVVMVDCRTEEMVADIFTKPLGTEKFEEAVDATKIDRILDSTAMSRLRNDPVSSDDWHKYRSTLDLVRLLEELESASKSLLQQPEMLELKMYFHTRYTQDNKISIEADTGPHAGPAAGPMGSVGRIGPVDLSGNSTASILALYLQTCERRCIEAVIEAATIHDDRVLGSIIHDGIHVVRQEGEPVLAPARLRRWETHVAAKTGLHIELATKPFELDPEWLAPAMQPGVNIWDDRWLGDGDIMISYNEMKELWERRSFKVVKAAIFVRKEVDSHDVASERHLIESYKHVHYTEIRGDHSNVTVHKHSFIAKWLVDPNIRRYEKIALIPPPLRVPVGTYNLWSGFTVEKYTPSPDRPVNTDSDAVRAYLSLFDMLCLHDTETYNYVLNWIAQMFQLPARKIGKCIVLKGEEGVGKNRATDLLSLMLGPRDLFLQTADPATKLYGRFNLPRAGKLLIVINEPSGGDSFPAINAIKDMPDHHLTSSSNVSGVRIGSCSRRTSPKWLGPGSMPEEQDSGSRAAVKDAAQQEFHDSTVDRSSTWLHVAAEAVEA

SEQ ID NO: 3818 - protein, 1405 aa, Rhizopus azygosporus
MSEAEKANEKQIKKVAKKAMKKNDSAPDSSVKRRTSCHMEGPSSARSPLCPNKKVSKEDQVKAIIGEYTSVTRKIKLETILLPKHRDLTATFIEVSEQIRIIVVRSQISLVVGKRVTNSSTLSEDVIIRWDEFSQTYDIKKILPNHNMAEGRKIAEEYCYGKVCGLSSTWHELNRSVSDEDKALIDDACHKLTEVDVPKPVTLDKLGASPGSYFPMLKCILASYEEEHYKAKQNQEIKPDVPRLFALTPSPSFKFRSVPITPTTPKAFTSEFKKLQRTFRDNQNMFFRILDLAKLKLKNINELDTNTEHRKEVFSNFIGTDGYSADIVIYKKKRISEGSHDMAYDMNDLHVAITENQYDLETFCLTGLDPGGSSVFTAAHGGDNGTYQVRRCTRKEYNTYSDSTRIANQEAKRAEQERMTEVLNILSNLAKYFAFYKSGTARTRFYLYQGRQRALEEMANILVDDERGEKKCWAPSAFKHDTDKLPIIAFGNGMKGKDAAKIKGQQVGITGVLYDKLKQRQKEGRLLVTYIDEFNTLKNKSIGTVKALYDYQAQSSEELSFKIDDVMTLYYKDDPDWYFAATEDDQFGLIPRNYTEELTSPKETGTSIDTPACEPKWAIALYKFDPQDKEETQLDENEQILVTDYVSSSDWWTIEHKDGKSGIVPATYVKFQDEYEAELKKQEMNARKEQEQLQQSARMKAEEEERERSRQEEAERRRKMQEEARQKEEEKRRQEALMAARSMSTSSESASPRRSQIPAPPPPISATQVSKQAVVPFDPSKPDPTKTRWWTDRTGAFKVEAQLVACSNGKIRLFKTNGVKIDVPLEKMCFDDLKYVEQETGQKLVEDKTDNIPLAHLSRKFSWLEYFKKMNMPHDASNQYAKAFERERLGEKDIEYLTYGKMRSLGMSEKHIRRLQKFIETNRAEPLSDDESTRPKIKVKKSVTFGSVSIIEDHAVIEISDDEDEYNDHNEYVQKQIEQDERLARMLQEQENQQQTNAHISAPSVTLHRRGTGRPTPSHSAPKGVNPDAFTSNQFKPETLKPTPAPPPMRPLQPSPVQHTAPLPLGQPSHTPPNTVIAVNKSGFEDDAWTPRSSHSPSIQTSVFTSNNVSNSPSINSAAPQLPARSRPTPQISQQSSVDPQLLAKWGGSPSLAAANQQPVPPIPSAPNNSSTVGFNQANSFGHQNSLQPFQQQQQQQARLSPIMTANNSFTGTSPSMQHQQPTQFASQFSTLPQHSNTHTMHVTPLQPALQPPLVPQPTISPVSSYNMNPVQPQMTASSTMTSSTASSRTWANATPDNPFGTKPANHNAPLIHSHSAPILVDNSFQQQSFNTPGYSSNAIDPTDKYSIFKTIDTNAPSILKPAGPFQQQQQPQSQHQPSFVQMQAQQYNSMFMNPQQQQQQQQRW

SEQ ID NO: 3819 - protein, 536 aa, Diversispora epigaea
MTSQLKHCDDGPTPEELLLSGHLVENDSIQLLTYKKSLEITNRHKSRKRPRSVTPESVQNINETTLNDKSQIFDNTTQNTKSSVISDRDLTGNAGGLLPFWNEYTQKESKKWTDCVDLDPSLWNGSLRKMGLGSWYSVRMSVLKVVKPENLRKTYSQLSRYLWQDIMECVPPPIVEEDEKLPKPKKNKSSKIPAGKTQRIRLFPTQEEKSKLKCWMGTVRWTYNRCLVAVEKEGIERTKKALRAQCLNAANFNNTELQWVLETPYDIRDEAMNDLLKSYSSNFAAKRKKFKMKFCSKKDQQQSIAILSKHWGKSKGVYTFLCKMKSAENLPAELHYDSRLVMNRLGEFYLCIPQPLEIWAENQGPTQSDAVIALDPGVRTFITGYDPSGQAVEWGKNDISRIYRLSHIYDKIQSTHDSIHGKVRKRKRYKLRRVMLRIHKKICCLINDCHHKLAKWLCQSYRIILLPKFQTQGMVRRGKRRIRSKTARMMLTWFHFRCRRSTFLHPTYGSFKEFIVLPVRYKTFSLVNTLFLEGTS

SEQ ID NO: 3820 - protein, 604 aa, Diversispora epigaea
MECVPPPIVEEDEKLPKPKKNKSSKIPAGKTQRIRLFPTQEEKSKLKRWMGTARWTYNRCLVAVKKESIERTKKALRAQCLNAANFNNTELQWVLETPYDIRDEAMNDLLKSYSSNFAAKRKKFKMKFRSKKDQQQSIAILSKHWGKSKGVYTFLCKMKSAENLPAELHYDSRLVMNRLGEFYLYIPQPLEIWAENQGPTQSDAVIALDPGVRTFITGYDPSGQAVEWGKNDISRIYRLSHIYDKIQSTHDSIHGKVHKRKRYKLRRVMLRIHKKICCLINDCHHKLAKWLCQSYRIILLPKFQTQGMVRRGKRRIRSKTARMMLTWSHFRFRQYLLHKVREYPWCRVIICTEEYTXIPQPLEIWAENQGPTQSDAVIALDPGVRTFITGYDPSGQAVEWGKNDISRIYRLSHIYDKIQSTHDSIHGKVHKRKRYKLRRVMLRIHKKICCLINDCHHKLAKWLCQSYRIILLPKFQTQGMVRRGKRRIRSKTARMMLTWSHFRFRQYLLHKVREYPWCRVIICTEEYTNKTCGCCGHIHRKLGGSKVFRCPSCTAELDRDINGARNILLRYLTVISKEPVYAGAGTYPWDLHDPCRTRIFPYWA

SEQ ID NO: 3821 - protein, 278 aa, Diversispora epigaea
MRLSQGIRRINVNIMFFILDRQTITIRAQYCREPFRFYIRLLHNKELLAVDPNHPHHKMKLPFHHEHRRHNHVYPREPSGRNSRCSHRSGVRTFLTWYSPTVGHGNIGDNDINRVFHLCFALDAFISRTRALAKKHNSFKHAQARMRRHIQNLVDEVHKKTALWLTKTFDIIVLPKFNSVQMSHKQKRKINCKTIRKMMSWAHARFRNRLLSKAEEFGKIIITSVSEAYTSKTCSRCGYIKRNLGGNKVFRCDGCGLQINRDLNGARGIFPGHCLMEP

SEQ ID NO: 3822 - protein, 485 aa, Diversispora epigaea
MLDPLSAFXTYDVSVETLRRWADSGRIAIVRTPGGKRLYSITNIQEIFRDNQQTQITQKAKICYAKVSSEHQRDDLERQIANLRQYYPEYEIISDIGSGLNWKRRGTDCADLDPSLWNGSLRKMGLSSWYSVRISVLKVVKPENLRKTYSQSSRYLWQDIMECVPPPIVEEDEKLPKPKKNKSSKIPAGKTQRIRLFPTQEEKSKLKRWMGTARWTYNRCLVAVEKEGIERTKKALRAQCLNAANFNNTELQWVLETPYDIRNEAINDLLKSYSSNFAAKRKKFKMKFRFKKDQQQSIAILSKHWDKSKGVYTFLCKIKSAENLPAELHYDSRLVMNQLGEFYLCIPQPLEIWAENQGPIQSDAVIALDPGGMVRRGKRRIRSKTARMMLTWSHFRFRQYLLHKVREYPWCRVIICTEEYTSKTCGCCGHIHRKLGGSKVFRCPSCTAELDRNINGARNILLRYLTVTSKEPVYAGAGTYPLGPS

SEQ ID NO: 3823 - protein, 581 aa, Diversispora epigaea
MTSQLKHCDDGPTPEELLLSGHLVENDSIQLLTYKKSLEITNRHKSRKRPRSVTPESVQNINETTLNDKSQIFNNTTQNTKSSVISDWDLTGNAGSLLPFWNEYIQKESKKWTDCADLDLSLWNGSLRKMGLGSWYSVRISVLKVVKPENLRKTYSQSSRYLWQDIMECVPPPIVEEDEKLPKPKKNKSSKIPAGKTQRIRLFPTQEEKSKLKRWMGTARWTYNRCLVAVKKEGIERTKKALRAQCLNAANFNNTELQWVLETPYDIRDEAMNDLLKSYSSNFAAKRKKFKMKFRSKKDQQQSIAILSKHWGKSKGVYTFLCKMKSAENLPAELHYYSRLMMNRLGEFYLCIPQPLEIWAKNQGPTQSDAVIALDPGVRTFITGYDPSGQAVEWGKNDISRIYRLSHIYDKIQSTHNSIHGKVHKQKRYKLCRVMLRIHKKIRCLINDCHHKLAKWLCQSYRIILLPKFQTQGMVRRGKRRIRSKTARMMLTWSHFRFRQYLLHKVREYPWCRVIICTEEYTSKTCGCCGHIHRKLGGSKVFRCPSCTAELDRDINGARNILLRYLTVTSKEPVXGHASYT

SEQ ID NO: 3824 - protein, 386 aa, Diversispora epigaea
MECVPPPIVEEDEKLPKPKKNKSSKIPAGKTQRIRLFPTQEEKSKLKRWMGTARWTYNRCLVAVEKEGIERTKKALRAQCLNAANFNNTELQWVLETPYDIRDEAMNNLLKSYSSNFAAKQKKFKMKFRSKKDQQQSIAILSKHWDKSKGVYTFLCKMKSAKNLLAELHYDSRLVMNQLGEFYLCIPQPLEIWAKNQGPTQSDAVIALDPGVRTFITGYDPSGQAVEWGKNDISRIYRLSHIYDKIQSTHDSIHRKLCQSYRIILLPKFQTQGMVRRGKRRIRSKTARMMLTWSHFRFRQYLLHKVREYPWCRVIICTEEYTSKTCGCCGHIHRKLGGSKVFRCPSCTAELDQDINGARNILLRYLTVTSKEPVYAGAGTYPLGPS

SEQ ID NO: 3825 - protein, 308 aa, Glomus cerebriforme
MNKEINKKQVKVISVRGGGYITKNEFFQELKEIKSDIKEIKETVIPPKQGKKEDTKITKLEVQEDKLVAQLSDGRELSIPIDCNIGLVKIKLHRAIEGIVKTCSILVKNGKYYACFACEVEPKPLPKTGKKVGGDLGLTSFLATSDGKLYQAPKTYRKAEKGLAKAGRRTSRRIKKSKRRKKAVILLAKQHEKVSNQRKDLAHRLAKELVEKHDAYKVAETGKQGVEVKAKNTSQICSECDKQREQKLKLSQRKFTCSFCPYSDNRDINAARNILKRAERSAVFLQSKGREGLGTSLQGAVPVGAVRN

SEQ ID NO: 3826 - protein, 323 aa, Glomus cerebriforme
MYLSAHQATKKLGISSDTLRRWLKQGKITAKTSPSGTRLYNISSIFPESTSQNVETTTTKKGFLYARVSSAKQKEDLEWQKQLLSSRYPTYELISDIGSGVNFKRPGLKTLLERTSHEMVSEIVVTHRVGKIGEYDIGRIFRLCKHMDDLISKKDKLASSTSKXKKKKALRVDNAISHMQKKIKQLQNEIHRKTIKFLTDEFDVVIIPPFEVSNMVNRKTRKITRKTVRKMLCWSHYKFRQRXISKAEEKGIHVIIQNEAYTSKTCSWCGNIQRIGGSEIYKCKNCNIKIDRDINGARGIFLRALLDGALILSRDHAGNNSNT

SEQ ID NO: 3827 - protein, 1090 aa, Glomus cerebriforme
MYLXAHQATKKLGISSDTLRRWLKQGKITAKTSPSGTRLYNISSIFPESTSQNVETTTTATTTTTTTTKKGFFTHGSLVPNKKRILNGRNNSSAPDTQPTDSSAISDQGSTSNDRDLRPYWNGQVMEWSQKLWLPIVTDSAALPSTSSNILTINTVFICRMQGRRAAMHRRERKAKDTKNNKYTEQKKRKTETTVNQTLSIKTYLNHSQKKILKRWLGLMRYAYNTVXRWDKNHIRPQTLNEKLKLYVDVKEGKDPDEKXKKLQRSCVWGERKFLRTVVWLGLRLRGLHNEVPANVIDESIDEALDLQQTMIIRAQNFSKKEWNHFYVRHLHNSSNLSSKRYKPNELEDGKRDLRPFHFETKRKCNKWPLQKIDCDCKFTYIRKTNEWIFHWVYEXQKQXXETQAEVHVASIDPGVRTPFTWYSPTKGVGKIGEYDIGRIFRLCKHMDDLISKKDKLASSTSKRKKKKALRVDNAISHMQKKIKQLQNEIHRKTIKFLTDEFDVVIIPPFEVSNMVNRKTRKITRKTVRKMLCWSHYKFRQRLISKAEEKGIHVIIQNEAYTSKTCSWCGNIQRIGGSEIYKCKNCNIKIDRDINGAQGIFLRALLDGALILSGEIICVAYGEFRKGYNGDKEDTRVLFYGLRYIIENYIAIKWSKKDVELAEKFFATHNAGFTAFQFPKDLFLKFIEENNGYFPVKIESLPEGTSCYVHTPVFQITAEKEYSLLVTYLETIITMVWYPTTVGTLSRRARDRIEKAYQETVDDEGFWTLENQLHDFGFRGCTSIEQSIIGAAAHLLNFSGTDTMNAAYYVQFLLNNGKPVATSIPATEHSVMTAHKTERDAILREISNYGTGKFACVMDSYDYSNALDKVLPSIAKQKLEKGGFMVLRPDSGDPIEVVLMALKSADKVFGSDVNKKGYKVIRGASVIQSDAVTIESLEAILKTVKEAGFSAQNVTFGMGGGLLQKLNRDTMSFATKLSHITYADGTRRDIMKTPKTDSGKISLPGEFGVKKNKQGIPIVHPKENCLENDPDNLLKVVYDHGKVCEWEDFETIRNRVAKEWPSLPLSYDNISPELKIKIEKIIQEIKTTQS

SEQ ID NO: 3828 - protein, 338 aa, Glomus cerebriforme
MLLRVTFGIAPANITDEAIDEALTAKEEVIKRNSEQQKMSTHSLKFRTLKALRQTMSIRSINFSRKTWNKFYVTYLHTSEIYTRNSYKKSQYNVQQKLWPLHFEKKRTNNNWPEPNLVKYDSKLSYSEKLNEWIFSWVYEKQRQVHKTQADCGLHAVSIDPGIRSPFTWYSPTKGTEKIGLNDIGRIIRICFFIDKLCSKRDKILTCISKRKKNKAHCIDKAISRLRRNIKRLQTEIHRKTIKFLTREFDVIIIPPFEVSDMVNHKTRKITRSSVQKMLCWDHYLFHQRLVSKAEELGISIIIQNETYTSKTCSCCGYVKNINGKKVYKCDQCKTVID

SEQ ID NO: 3829 - protein, 512 aa, Glomus cerebriforme
MTSQLKHCDDRPPPEGLQSLGHLVENDAIQLQTYKESLEITNRHSSCKRQRSVTPESAQNINETTLSDKSQISDSTTQSTKLSATLVQGSTGNAEVLLPFWNEYTQEESRKWWLPERTDCVDLDPSLWSGSLKRMGLGSWYSVRMSVPKVVKQENLRKTCSRSSRYLWQDITECAPPPTVEEDEKLPKPKKNKSSKIPAGKTQRIRLFPTQEEKSILRRWMGTARWTYNRCLVAVEKEGIARTKKALRAKCLNAANFNNTELKWIDNNLPAELHYDARLVTNRLGEFYLCIPQPLEIWAENQGPTQSEDAVIALDPGVRTFITCYDPNGIAIEWGKNDISRIYRLSHIYDKIQSKHDSIHGKVAKRKRYKLRRVMLRIHKKIHCLINDCHHKLAKWLCQSYRVILLPEFKTQGMVKRGKRRIRSKTARMMLTWSHFRFRQFLLHKIREYPWCRVIVCTEEYTSKTCGCCGHIHQKLGGSKVFRCPNCAAELDRDINGARNILLRYLTLLHSN

SEQ ID NO: 3830 - protein, 285 aa, Glomus cerebriforme
MYLSAHQATKKLGISSDTLRRWLKQGKITAKTSPSGTRLYNISSIFPESTSQNVETTTTATTTTTTTTKKGFFTHGSLVPNKKRILNGRNNSSTQPTDSSAISDQGSTSNDWDLRPYWNGQVAEWSQKLWLPIVTDSAALPSTSSSIYSPSILQNSWFSSTIRHPMIIIPPFEVSNMVNRKTRKITRKTVRKMLCWSHYKFRQRLISKAEEKGIHVIIQNEAYTSKTCSWCGNIQRIGGSEIYKCKNCNIKIDRDINGARGIFLRALLDGALILSGDHAGNNSNT

SEQ ID NO: 3831 - protein, 472 aa, Gigaspora rosea
MKRKKKKNNSESQKRIKPWAWSENISSRLWLPIDTNINKIENNNHKRVNFVEGCQSWFNTTSYEKTIKSNQKYFVLEPGDDKDYNPDNPDDVEEVLKTKKIRLYPTPEEAKKLRTWIDGARWTYNQAVNMHFYHGCHDFKLIRQNCLNDEYIERNPHIHWLFDTPRAVRESAIRQYKKAYQIQKKIRGKNFTMHYRSKKAKIQSIMVVARDYNREKGQFSFLKHIVSSEQLPKVNNTVIITLDKLGRFFIHIPVPLEDRENQTSCNGRIVSIDPGVRTFATYYDPRGRVVEWGSGDFGRIFRLCKQYNKFKSDLAIKKGGRYKRTRYLLRKKMYRTLLKIRNLTNEIHHKLAKWLLDHYDTILLPEFSTSNMVKRKNRKIRNKTARAMLTWGHFGFREFIKHKSREYYNKNVIICSEEYTSKTCGNCGFINNIKGAKRFSCSSCKISIDRDFNGARNIMLKYLIESDILLGI

SEQ ID NO: 3832 - protein, 554 aa, Gigaspora rosea
MLYLKIATPGRKVSLTDTALLVPHLNPKNTLATENQKYKLAQNKITYLSASKIQGTYDVSVETLRQWAASRKVAIVKTPGGKRLYSITDIYKAFGNDRRLPESMQKAKDPKSLVTSVQDSIGNAGGFLPFWNEYTLEESKKWWLPKKTVCVALDPNLWSGSLKKWNTARGIRFRHLCNDNETGELAEDLLSIVTVFVVRDIMDYALLPIAKEEKIPPKRFKSSKKEVMKLPAGKIGTARWTYNRCLIAVEKEGVKRKKKDLRARCLNAVNFQNKTKLEWVLETPYDIRDEAMNDLLKGYATNFAANRKNFKMKFRSKKDPQQSIAILSKHWGKSRGEFSFLHKMNSAESLPKQLEYDSRLVINRLGEFYLCIPEPLKIQAENQGPLFSENQEKDPSGMAIEWGKNDICRIYRLCHIYDRLQSKRDMNHGKRNKCKHYRLQRVMLHIHKRICCLVHECHHKLTKWLCENYRIIILPEFRTQRMVRRGQRRIGSKTAEPCVREEYTSKTCGFCGYIHHKLGGSKVFRCPKCKTELDRDINGARNILLRYLTKNESV

SEQ ID NO: 3833 - protein, 544 aa, Gigaspora rosea
MESESTHYENDQMKERSNICPQLTANDSTLLKAFQDCLEITSNPNKRKRPVIHESARTSKKRILNDNANTSNNDTRIREKIFYPFWTDASKELSSKLWLPEGIDYVNIKSDSWFSVQMCKIPIMENWPKICYELLPPDITVCEPYLTNLTRVNENKKKQTKTGKQQKNESLKMRKIRLYPNTEQQAILKRWMGTSRWTYNQSLRIYKSGVKDLKLVRKLVINKENFENDKDKCWVLKTPSSIRDNAFLEFKKNLKTELKKKRKFVMKFKSKKYCKKDQIRINVRDYDREEGQFSFLKKIKKSEAIDMKNKNEIIISRDKLNMYYLHVPIPLSIRNEKEGGIISLDPGVRSFITGYDPGGNVVEFCKNDFSRLSRLCVRHDKYQSQSIEVNSRKRYVIKRKMRRIYHKIRNLVDDCHKKIARYLCDNYQTIVLPIFETQGMVRRAKRKIRAKTARNMLTWSHFRFRQFLLQKMSEYPGRRLIICTEEYTSKTCGRCGYVKNNLGGNKKFKCDECGLIIDRDVNGARNILLKLLSQVIPDAMAYHP

SEQ ID NO: 3834 - protein, 453 aa, Gigaspora rosea
MKRKSSITRKSVQKRRKKISTDNVNTSGRDFQTTNSTENVRTLRPFWNHHTEEISKKLWLPKNVGFSNGSLVRTIQRSWYSVRTSTLMTPNPVSLPRIYYHSLLRQGSNDDEKNDDGKKMKTENDDDDDGGKKMKTRKIRMYPTPEEKETLRKWMGTVRWTYNKALSMMQDDGISNMKIITRHYLNDEGIMNNELSWVKQTPREIRSQVIRQLKSAYKTNKKLHGNNFRMKYKSKKDRTQTISILARDWKRNKGEYAFLKTIITSEKPPEINHTVNITMNRLGHFYLCVPVSIKIIDNQDDVRGRIIFLDPGVRTFMTGYDPDGQLIEWGNGDLDKVYKLSKKYDKLQSDKDLALGRINKRKRFRLRKKMLRIVYRIRNLIDECHHQLAKWLCANYEIILLPKFETSRMVLKNKREIRSKTARAMLTWSHYRFRMFLNHKSREFKGCKIIECT

SEQ ID NO: 3835 - protein, 544 aa, Gigaspora rosea
MESESTHYENDQMKERSNICPQLTANDSTLLKAFQDCLEITSNPNKRKRPVIHESARTSKKRILNDNANTSNNDTRIREKIFYPFWTDASKELSSKLWLPEGIDYVNIKSDSWFSVQMCKIPIMENWPKICYELLPPDITVCEPYLTNLTRVNENKKKQTKTGKQQKNESLKMRKIRLYPNTEQQAILKRWMGTSRWTYNQSLRIYKSGVKDLKLVRKLVINKENFENDKDKCWVLKTPSSIRDNAFLEFKKNLKTELKKKRKFVMKFKSKKYCKKDQIRINVRDYDREEGQFSFLKKIKKSEAIDMKNKNEIIISRDKLNMYYLHVPIPLSIRNEKEGGIISLDPGVRSFITGYDPGGNVVEFCKNDFSRLSRLCVRHDKYQSQSIEVNSRKRYVIKRKMRRIYHKIRNLVDDCHKKIARYLCDNYQTIVLPIFETQGIVRRAKRKIRAKTARNMLTWSHFRFRQFLLQKMSEYPGRRLIICTEEYTSKTCGRCGYVKNNLGGNKKFKCDECGLIIDRDVNGARNILLKLLSQVIPDAVAYHP

SEQ ID NO: 3836 - protein, 415 aa, Gigaspora rosea
MLSYSYNKKRKYVSQKSQAINSKIVKTSIQTLKTFKPYWNEFTKEITQKLPLHITAAMNLNTLNSPSIRLAQNSWFSVKALKCKAQQDDSQAASHSKQKETLIKWFGATRWTYNQALSAVEKDGIHRNKKALRAKCVDNENFQNENKWVLETPYDIRDEGMNDLLKAYKTNFAAHKKEFKIKYRSKKDESESIVIHSKHWVKAGVFYPNFFGKEPIRGAELLPDESENQAPQWTSIEERILSLDPGVRTFSTGYSPSGLAVEWGKMTLEEFIVSVMLLTNYKASSHKKKFGIKNVTVLLPEFETQRMVKRANRRIRSKTARAMLGWSHYRFKQRLINKTREYPWCRVIICDEHYTSKTCGNCGYLHKKLGSNKTFKCPQCQIGMDRDINAARNILLRFLTLNRAESSDLALGPTP

SEQ ID NO: 3837 - protein, 508 aa, Gigaspora rosea
MESESTHYENDQMKERSNICPQLMANDSTLLKAFQDCLEITSNPNKRKRPVIHESARTSKKRILNDNANTSNNDTRIREKIFYPFWTDASKELSSKLWLPEGIDYVNIKSDSWFSVQMCKIPIMENWPKICYELLPPDITVCEPYLTNLTRVNENKKKQTKTGKQQKNESLKMRKIRLYPNTEQQAILKRWMGTSRWTYNQSLRIYKSGVKDLKLVRKLVINKENFENDKDKCWVLKTPSSIRDNAFLEFKKNLKTELKKKRKFVMKFKSKKYCKKDQIRINVRDYDREEGQFSFLKKIKKSEAIDIKNKNEIIISRDKLNMYYLHVPIPLSIRNEKEGGIISLDPGVRSFITGYDPGGNVVEFYATDLSKIRNLVDDCHKKIARYLCDNYQTIVLPIFETQGMVRRAKRKIRAKTARNMLTWSHFRFRQFLLQKMSEYPGRRLIICTEEYTSKTCERCGYVKNNLGGNKKFKCDECGLIIDRDVNGARNILLKLLSQVIPDAVVYHP

SEQ ID NO: 3838 - protein, 320 aa, Gigaspora rosea
MSHKNLKQSIQKISQKLTLHITVATNLNTLNSPLIRLAQNSWFSVKALKCKAQQDDSQAASHSWVLETPYDIRDEGMNDLLKAYKTNFAAHKKEFKIKYRSKKDESESIAIHSKHWVKAGVFYPKFFGKEPIRGAELLPDELKYDCRLQKTRLGEFFLCLPMSLEIRRVRTFSTGYSPSGLAVEWGKNDIGRIYRLCHALDKLQSKWSQKEVRHKKRYRLKRAARRIRKKIRNLIDEQSLINKTREYPWCKVIICDENYTSKTCGNCGNLYKKLGSNKTFKCPQCQIEMDRDINAARNILLRFLTLNRAESSDLALGPTP

SEQ ID NO: 3839 - protein, 275 aa, Gigaspora rosea
MNDLLKAYKTNFAAHKKEFKIKYRSKKGESESIVIHSKHWVKAGVFYPNFFGKEPIRGAELLPDELKYDCRLQKTRLGEFFLCIPMSLEIRSENQAPQWTSIEERILSLDPGVRTFSTGYSPSGLAVEWEKNDIGRIYRLCHALDKLQSKWSQKEVRHKKRYSLKRAARRIRKKIRNLIDEVHKKFTKWIVEQYHIVLLTEFETQRMVKRANRRIRSKTARAMLGWSHYCFKQRLINKTREYPWCKVIICDEHYTSKTCGNCGYLSQKTRIKQNF

SEQ ID NO: 3840 - protein, 426 aa, Gigaspora rosea
MNRSFPGFMNDKRSQKTHERFVAIDPGVRTPFTTYSPSEGTCEIGKNDSQRLIRLAYHADKLSSKRDKLNNSSSKRKKKKGIRIDKAIARIFRKIKNLRNELHKKTINYLVKNYNVVIIPEFGRLKSKAEETGVEIIIQDEAYTSKTCSWCDRDVNGARGIFLRALLDGAICMHMAGFKKKLDRTGTKFLQTVGSIEKTVDKEFEEEERRFKSLEAKSEKLHKEAKGYLDSLRAITSAQSRIAETIEHFYEDSTDDTLAGKKYKDAIDRLEQDCREYLDDPYRQTVTEPIGRFCAYFPDINEAIKKRDKKLLDYDSQRAKVRKLVDKPSDDANKLPRAEQAANEAREIYESLNTQLVNELPRLIDLRVPYFNPTFEALVKIQLRFCQESYESLNSLQEYFADHDQVDNKVEAVLQKMRDLAICGMG

SEQ ID NO: 3841 - protein, 544 aa, Gigaspora rosea
MESESTHYENDQMKERSNICPQLTANDSTLLKAFQDCLEITSNPNKRKRPVIHESARTSKKRILNDNANTSNNDTRIREKIFYPFWTDASKELSSKLWLPEGIDYVNIKSDSWFSVQMCKIPIMENWPKICYELLPPDITVCEPYLTNLTRVNENKKKQTKTGKQQKNESLKMRKIRLYPNTEQQAILKRWMGTSRWTYNQSLRIYKSGVKDLKLVRKLVINKENFENDKDKCWVLKTPSSIRDNAFLEFKKNLKTELKKKRKFVMKFKSKKYCKKDQIRINVRDYDREEGQFSFLKKIKKSEAIDMKNKNEIIISRDKLNMYYLHVPIPLSIRNEKEGGIISLDPGVRSFITGYDPGGNVVEFCKNDFSRLSRLCVRHDKYQSQSIEVNSRKRYVIKRKMRRIYHKIRNLVDDCHKKIARYLCDNYQTIVLPIFETQGMVRRAKRKIRAKTARNMLTWSHFRFRQFLLQKMSEYPGRRLIICTEEYTSKTCGRCGYVKNNLGGNKKFKCDECGLIIDRDVNGARNILLKLLSQVIPDAVAYHP

SEQ ID NO: 3842 - protein, 519 aa, Gigaspora rosea
MIPQPPPLPKRKVFYTHVPQVKKKTLKDRNRSLNPDSRIMSSSMMSVQISLQSTPSLSVEYKEEDQLCTEESGKPKTIKARSKKKRKIETSVNRTLSIKTYPNHSQKKILKRWLELMRYAYNTVVRWNKNRRFCNSSKNFEWIKPYTLNEKLKLYTDIKEGKDLNEKDKKLRRSCVWGERKFLRTVVWLELRLKGLHDKVPANIIDESIDDALIARKNIIQKNLKDTKKSFLSFKSKKDLRQTMTIRAQNFSKKDWNHFYVTHLHNSSTLLSKRCKPNDFEGGKRDLCPFHFEKKRKHNKWPSQRIDCDCKLTYLHKTNEWIFYWVYEAQKQIRETQADVHVVSIDPGVRTPFTWYSSTKGAGKIGEYDIGRIFRLCKHIDDLISKKDRLASSISKQKKKKALRVDKAIFRMKRKISRLQEEIHRKTIKFLTDEFDMIVIPSFEVSNMFRQRLIPKAEEKGINVIIQNEAYTSKTCSWCGNIQNIGGSEMYKCKNCNIKIDRDVNGARGYFFGLCLMEP

SEQ ID NO: 3843 - protein, 330 aa, Gigaspora rosea
MNKQFFFRILLKHRIKTTKEWAFMEKVSYEVLDHSITSAILARDKVIRRNYELQSKGQPPRHKLNFLSKKNEKQTITIRTRHCHEPLRFYLRLLHNKQLIQATPKKLRQWTFIWVYSKDICENQTDYTHVVAIDPGVRTFLTWYSPSIGYGNFGDNDINRIFRLELALDNLISRTARTPAKKCNSMKCAQARLRKRIQNLINEVHKKAALWLARTFDVIVLPTFGSTRMSRRQKRKINSKIVQKMMSWAHARFRKRLISKMEEFGKIVITSVSEAYTSKTCSKCGYIKYNLGGNKGFRCNKCGFQINRDLNGARGIFLWALLDGVIVMQA

SEQ ID NO: 3844 - protein, 478 aa, Gigaspora rosea
MKRKREIESGIKPFWNNICEDVTNRISLPIDLDVTERCNNKYSESERHSSSWFNITERSDVLREGIDLFVPSNEKEPLKDDELKTRKIRVYPTPEEREVLSNWMNTSRWIYNRCLDCIKDGICTVNKKSLREKCVNNHNYEGTDLHWVLETPYNIRNDVMQELVKNYKTNLKTYKNKKIKFDMKFRSRKNFTQSLPIQARDFNRKQGVCSFLNRIIISEPLPEIKHDFNIVCDQLGRWYFCVPVELEKRTSKKGIISLDPGVRTFMTGYDPSGSVIHFGQNDIKRIFRLCKRYDKYKSDRDLVKGRENKRRRYRLRKKMFGINQTIRCLVDEIHHKLAKHLCDNYSVNLLPRFKTKNMVRKKNKEELENQEPEQDSVELFKKKLKRKIKSKTARMMLTWSHYRFQQFLLHKSRKYENNRVIICTEEYTSKTCTRCGSINQKLGGSKVFKCRECKLTIDRDVNGARNIFLKYVSEHMLL

SEQ ID NO: 3845 - protein, 430 aa, Gigaspora rosea
MKRKREIESGIKPFWNNICEDVTNRISLPIDLDVTERCNNKYSESERHSSSWFNITERSDVLRESIDLFVPSNEKEPLKDDELKTRKIRVYPTPEEREVLSNWMNTSRWIYNRCLDCIKDGICTVNKKSLREKCVNNHNYEGTDLHWVLETPYNIRNDVMQELVKNYKTNLKTYKNKKIKFDMKFRSRKNFTQSLPIQARDFNRKQGVCSFLNRIIISEPLPEIKHDFNIVCDQLGRWYFCVPVELEKRTSKKGIISLDPGVRTFMTGYDPSGSVIHFGQNDIKRIFRLCKRYDKYKSDRDLVKGRENKRRRKKNKEELENQEPEQDSVELFKKKLKRKIKSKTARMMLTWSHYRFQQFLLHKSRKYENNRVIICTEEYTSKTCTRCGSINQKLGGSKVFKCRECKLMIDRDVNGARNIFLKYVSEHMLL

SEQ ID NO: 3846 - protein, 535 aa, Gigaspora rosea
MESESTHYENDQMKERSNICPQLTANDSTLLKAFQDCLEITSNPNKRKRPVIHESARTSKKRILNDNANTSNNDTRIREKIFYPFWTDASKELSSKLWLPEGIDYVNIKSDSWFSVQMCKIPIMENWPKICYELLPPDITVCEPYLTNLTRVNENKKKQTKTGKQQKNESLKMRKIRLYPNTEQQAILKRWMGTSRWTYNQSLRIYKSGVKDLKLVRKLVINKENFENDKDKCWVLKTPSSIRDNAFLEFKKNLKTELKKKRKFVMKFKSKKYCKKDQIRINVRDYDREEGQFSFLKKIKKSEAIDMKNKNEIIISRDKLNMYYLHVPIPLSIRNEKEGGIISLDPGVRSFITGYDPGGNVVEFCKNDFSRLSRLCVRHDKYQSQSIEVNSRKRYVIKRKMRRIYHKIRNLVDDCHKKIARYLCDNYQTIVLPIFETQGMVRRAKRKIRAKTARNMLTWSHFRFRQFLLQKMSEYPGRRLIICTEEYTSKTCGRCGYVKNNLGGNKKFKCDECGLIIDRDVNGARNILLKPLVIK

SEQ ID NO: 3847 - protein, 300 aa, Gigaspora rosea
MYLKLRSKNVYDEIPNNIIDETVDEAIKNFNAKKNGTKLKFKTRKDLKHTITIHATNFSKKEWNRFFITYLFNDSIKTPRKKPYELKTCSRDLRALHFETKRKNNGWPLEKIDSDCKLMYFRKTNEWILSWVHERQKETKKTHERFVAIDPGVRTLFITYSPSEGTCEIGKNNSQRLIRLAYHADKLSSKRDKLNNSSSKRKKKKGIRIDKAIARIFRKIKNLRNELHKKTINYLVKNYDVVIIPEFGRLKSKAEETGVEIIIQDEAYTSKTCSWCDRDVNGARGVFLRALLDGAICMHM

SEQ ID NO: 3848 - protein, 233 aa, Gigaspora rosea
MTIILDKLGRFYIYISVLLEDRESQTSCNGQIVSIDSGIRIFATCYDPRDHIVEWSNGDFVRIFRLYKQYNKFKSDLATKKGGRYKHTRYLLRKKMYQKVLKIRNLVNEIHHKLTKWLLYHYETILLIPEFGTSNMVKRKNRKIRSKTACAMLTWGHYRFREFIKHKSREYYNKNVIICSEEYTSQTCGNCGFRNNIRGAKRFSCISCKISINKDFNGARNILLKYLIESDIL

SEQ ID NO: 3849 - protein, 499 aa, Gigaspora rosea
MKRKSSITRKSVQKRRKKISTDNVNTSGRDSQTTNSTENVRTLRPFWNHHTEEISKKLWLPKNVGFSNGSLVRTIQRSWYSVRTSTLMTPNTVSLPRTYYHSLLRQGSDQPKTTENDDDDDGKKLKTRKIRMYPTTEEKETLRKWMGTVRWTYNKALSMMQDDGISDMKIITRHYLNDEGIMNNELSWVKQTPYATRSQVIRQLTRAYKTNKKLHGNNFRMKYKTKKDRSQTISILARDWKKNRGEYAFLKTIITSEKPPEINNTVNITMNRLGHFYLCVPVPMKIIDNQDDVRGRIISLDPGVRTFMTGYDPDGQLIEWGNGDLDKVYKLSKKYDKLQSDKDLALGRINKRKRFRLRKKMVRIVHRIRNLVDECHHQLAKWLCANYEIILLPKFETSRMVLKNKRKIRSKTARAMLTWSHYRFRMFLNHKSQEFKGCKIIECTEEYTSKTCGNCGLIKNNLGGSKTFRCESCDLVIDRDVNGARNILLKYLTEGQVLA

SEQ ID NO: 3850 - protein, 508 aa, Gigaspora rosea
MKRKSSITRKSVQKRRKKISTDNVNTSGRDFQTTNSTENVRTLRPFWNHHTEEISKKLWLPKNVGFSNGSLVRTIQRSWYSVRTSTLMTPNPVSLPRIYYHSLLRQGSNDDEKNDDGKKMKTENDDDDDGGKKMKTRKIRMYPTPEEKETLRKWMGTVRWTYNKALSMMQDDGISNMKIITRHYLNDEGIMNNELSWVKQTPREIRSQVIRQLKSAYKTNKKLHGNNFRMKYKSKKDRTQTISILARDWKRNKGEYAFLKTIITSEKPPEINHTVNITMNRLGHFYLCVPVPMKIIDNQDDVRGRIISLDPGVRTFMTGYDPDGQLIEWGNGDLDKVYKLSKKYDKLQSDKDLALGRINKRKRFRLRKKMIRIVNRIRNLIDECHHQLAKWLCANYEIILLPKFETSRMVLKNKRKIRSKTARAMLTWSHYRFRMFLNHKSQEFKGCKIIECTEEYTSKTCGNCGLIKNNLGGSKTFRCESCDLVIDRDVNGARNILLKYLTEGQVLA

SEQ ID NO: 3851 - protein, 275 aa, Gigaspora rosea
MNDLLKAYKTNFAAHKKEFKIKYRSKKDESESIVIHSKHWVKTGVFYPNFFGKEPIRGAELLPDELKYYCHLQKTRLGEFFLCLPMSLEIRSENQAPRWTSIEERILSLDPGVRKFSTGYSPSGLTVEWGKNDIGRIYRLCHALDKLQSKWSQKEVRHKKRCRLKRAARRIRKKIRNLIDEVHKKFTKWIVEQYHIVLLPEFKTQRMVKRANRRIRSKTARAMLGWSHYCFKQRLINKTREYPWCKVIICDEHYTSKTCGNCGYLSQKTRIKQNF

SEQ ID NO: 3852 - protein, 392 aa, Gigaspora rosea
MENWPKICYELLPPDITVCEPYLTNLTRVNENKKKQTKTGKQQKNESLKMRKIRLYPNTEQQAILKRWMGTSRWTYNQSLRIYKSGVKDLKLVRKLVINKENFENDKDKCWVLKTPSSIRDNAFLEFKKNLKTELKKKRKFVMKFKSKKYCKKDQIRINVRDYDREEGQFSFLKKIKKSEAIDMKNKNEIIISRDKLNMYYLHVPIPLSIRNEKEGGIISLDPGVRSFIAGYDPGGNVVEFSKNDFFRLSRLCVRHDKYQSQSTEKIARYLCDNYQTIVLPIFETQGMVRRAKRKIRTKTARNMLTWSHFRFRQFLLHKMSEYPGRRLIICTEEYTSKTCGRCGYVKNNLGGNKKFKCDECGLIIDRDVNGARNILLKLLSQVIPDAVAYHP

SEQ ID NO: 3853 - protein, 287 aa, Gigaspora rosea
MHRRKKKEKNINHEKKQEKKTGRRREQIIECEIVSESCAETLVETMDEIGTIPENDRIFEIKKQEGLRTPYDLKECSRDLRALHFETKRKNNGWPLEKIDSNCKLTYLRKTNEWILSWVHERQKESKKTLERFVAIDPEVRTPFTTYSPSEGTCEIGKNDSQRLIRLAYHADKLSSKRDKLNNSSSKRKKKKAIRIDKAIARIFRKIKNLRNELHKKTINYLVKNYDVVIIPEFGRLKSKAEETGVEIIIQDEAYTSKTCSWCDRDVNGARGIFLRALLDGAICMHM

SEQ ID NO: 3854 - protein, 285 aa, Gigaspora rosea
MLLSKNDAESRCSSNKRGRGLRLFTILPHTSFQQWFVLIDSDALYQIFSKINFCGLGKVSKSDFNKNIEEWWRVVFRIDKVTTTQQRFGFSIMTDGMSVSANLKRRDNDHIVGLDPGRKDLFVAMNIPTPSCSSITSYNNYLTYALQHMRTLIEFYGERCWLLAYGDGKFSSCSKGHVSGPIKGLYRELKRRLGKRVRLVDEYRTSIICSTCNGRMDKRSRFWSLKVSFQTLWNRDTNAARNIRRLFFYMNFNNGERLEEFRRSQNRGGEELPFTVATSGVSSDA

SEQ ID NO: 3855 - protein, 276 aa, Gigaspora rosea
MKTPRKKPYEPKTCSRDLRALHFETKRRNNGWPLEKIDSDCKLTYFRKTNEWILSWVHERQKESKKTHERFVAIDPGVRTPFTTYSPSEGTCEIGKNNSQRLIRLAYHADKLSSKRDKLINSSSKRKKKKGIRIDKAIARIFRKIKNLRNKLHKKTIDYLVKNYDVVIILEFGVSNMVKKEKRKINSKVVRCMLTWSHYMFRQRLKSKAEETGVEIIIQDEAYTSKTCSWCSNIQNIGGRKIYKCKNCNLIIDRDVNRARGIFLRALLDGAICMHM

SEQ ID NO: 3856 - protein, 433 aa, Gigaspora rosea
MNYHKISLQSTPSLSVEYKEEDQLCTEESGKRKIKTINTRSKKKRKVETTVNRTLSIKTYPNHSQKKILKRWLGLMRYAYNTVVRWNKNRRFCNSSKNFEWIKPYTLNEKLKLYTDIKEGKDLNEKDKKLQRSYVWGERKFLRTVAWLELRLKGLHDKVPANIIDENWNHFYTTYLHNSSTLLSKRCKPNDFGGGKRDLCPFHFEKKRKHNKWPQKINCDCKLTYLRKTNEWIFHCVYEAQKQIRETQADVHVVSIDPGVRTPFTWYSSTKGVGKIGYYDIGRIFRLCKHTDNLISKKDRLASSISKRKKKKALRVDKAIFRMKRKIKRLQDEIHRKTIKFLTDEFDMIIIPPFEVSDMVNRKSRKITRKTVRKLLCWSHYKFRQRLISKAEEKGIHVVIQNEAYTSKTYTVVGVEIFRILEDQKCTIARIVA

SEQ ID NO: 3857 - protein, 395 aa, Gigaspora rosea
MESESTHYENDQMKDRSNICPQLTANDSTLLKAFQDCLEITSNPNKRKRPVIHESARTSKKRILNDNANTSNNDTRIREKIFYPFWTDASKELSSKLWLPEGIDYVNIKSDSWFSVQMCKIPIMENWSKICYELLPPDITVSSNFEEMDGHIQMDLQPKFEYLQVRSKRSKVGAQARDKQGKFRKRQGQVLGVEDSIIDLSFITGYDPGGNVVEFCKNDFSRLSRLCVRHDKYQSQSIEVNSRKRYVIKRKMRRIYHKIRNLVDDCHKKIARYLCDNYQTIVLPIFETQGMVRRAKRKIRAKTARNMLTWSHFRFRQFLLQKMSEYPDRRLIICTEEYTSKTCGQCGYVKNNLGGNKKFKCDKCGLIIDRDVNGARNILLKLLSQVIPDAVAYHP

SEQ ID NO: 3858 - protein, 891 aa, Gigaspora rosea
MRLPFQAVLKEERSNLPKNTTNVILNNVRNNVYAPLCPTNLMWNNRNGLGQIISSMARLHATNCQNHVVVNLHNCVTCWIQWKLEKQLQFISKKNNYKLNPQYRILVEIRARYIFQKVKQVILENKLISEDVIKQEWWNYLQPLWKILITFEKNYRIDAESRCSSNKQGRGLRLFTILPHTSFQQLFVLIDSDALYQIFSKINFCGLEKISKSDFSENIEEWWRVAFRIDKVTTTQRRFGFSIMTDGMSVSANLKKEVTKQDIPVTTTQRRFGFSIMTDGMSVSTNLKKEVTKQDIPVNAYGFDKEDIPTPSCSSITSYNNYLTYVLQHMHTLVEFYGERRWLRMRWKSYINRNKAYDKICERITKKNPRTIVAYGDGKFSSCSKGHVSGPIKGLYKELKRRLGKRVRIVDEYQTSIICSTCNGRMDKRSRFWSLKTLWNRDTNAARNIRRLFLYMNSNNGERLEEFRRTQNRGGEELPFAVATSGKYLKIFDIDMATIKVVHGSVSRRFAIGTDTTWSNLESQFRNLFQIPSHAQLIATYIDEDGDNVALSSDLELAEVISQCSAGTAIKIILKTKPTIDETAAAFEQISLEDEESYETIIYSHSEPEETEEQGTCKETCEEIYEEVIYSADEVHEQGQTDYSSSDPEIYFFVSRKRSHRGPRRIYSGSAKLESFGGPSACPFAERSRGPHGRGHARMHRVHKHGEPGHHHHRGHRFRGHRYPYKMCKRDGGNENERMEDKSDKCPEMNESGPSFKEEHHHGHHMHHRKCDKKAKLYSSGDERPRHHCARVHAHPYFHHKHGHGHHGRHGDHGEIPPERIAEKLEILNGLSFPTENNSHYEELLKRYHGRIGLVVEAVVREQRKKEPKEPEDDDPEGDEGQASTSQPMQS

SEQ ID NO: 3859 - protein, 349 aa, Gigaspora rosea
MQKVDAVPISEVADYVYLRFYHIPVLNNGKISKSEFSENIEEWWRVLFQIDKVATTQRRFGFSIMTNGMSVSTNLKKEVTKQDIPVNAYGFDKEGNFYSLDVRDNDCIVGLDPGRKDLFVAMSEEKKPIRCSTKEWHILSGHVYARKKTEVWIKGNNIFENILHNIPTPSCSSITSYNNYLTYVLQHMRTLVEFYGERRWLRMRWKSYINRNKAYDKICERITKKNPRTIVAYGDGKFSSCSKGHVSGPIKGLYRELKRRLGKRVRFVDEYQTSIICSTCNGRMDKRSRFWSLKTLWNCDTNAARNIRRLFLYMNSNNGERLEEFRRTQNRGGEELPFTVATSGVSSDA

SEQ ID NO: 3860 - protein, 1186 aa, Pogostemon cablin
MREPLVGERFARMKIPCPGPLPRLVALPVHDDGVHRYVWIEDVVANHLEHLFPGLETVAAYPFRVTRNADIEIQEDEAEDLLRTIEEGIRRRHFEYVTRLEIPPTMPESVRRVLIDGMEMDTENVIEVEGEVGHASLMELLKIDRPDLKFAPHVPRIPPGLTTGEDLFSIIARHDVLLHHPYDSFTPVTDFIQTASRDPYVRAIKQTLYRLGPNSPLVPALIEARDADTQVAALVELKARFDEQNNIQWARRLEDAGVHVVYGLIGLKTHCKVTLVVRRESSGIRRYLHLGTGNYNATTSRFYTDYSLFTADPDLGADATHLFNYLTGYARKEDFKRLLVKMLVAPVNLRERLSAMIAREAEHARLGRPARLIFKMNALVDPGMIDLLYSASQAGVKVDLLVRGVCSLRPGLPGVSDNITVTSIVGRFLEHARVYYFENGNMHVFPKIWHNKLVRKTFKYRLLPTKTQETGMQDILNECRWLYNHLLEKRKTAWEGQQESLTYYGQKKTLPDLKAVRSSLKTVHSQTLQDVVMRLDLAFQAFFRRVKAGETPGYPRFRGFDRFDSFCYPQCGLFYTDLXXXXTVCIRRQAGFWYVCFSVESEPAHLSPSEESVGIDVGLHDFAILSTGEAIVNPRFYCCDEKDLARVQRRVSRASKGSSARRKAKKALQKVHRRIANRRNDFVHQRSRALVNRFGTICVEDIHVNRMIHNHCLAKSILDAAWSQFFGCLSSKAEWANRQVLKVNPAYTSQDCHRCGHRQKMPLSARTYDCPCCGLSIGRDHNAALNIKRIGLGLQSIGTQSVEAAPRKSPGCIAGYMQPSRPRKESCMQVDQDIAPAQKGGSFGFWTRTPLYLRIVIALVLGIVTGLVFGQQVTWMREVSTMVLALLRALATPLILLAILHALLRTNLGGGMARRMGGYLLTNTLAAIIIGLTVANVVQPGRWAGNTLGAPTATEVTAVAEKKPYDPVEDIKSKIPTNIIKPLYDDNIIAVIILGIVFGLALRRVREEQLKEDNAAYKSVENFIETCFTAVMTALHWIIQLVPIAVYCIVSSVIGKEGFLPFQHLLGFIVAVLLALALQLCYYLMRGSSTLLPGVADLSAAHMPSAPEKNGAHDLYNNAPCGSYVIDAQGIFVSLNDTLLRWLGYSREDIVGRLRLGIRTATARRDGVFRLDELGTGLRRGGRMHR

SEQ ID NO: 3861 - protein, 368 aa, Pogostemon cablin
MQVKCYRYKLNPTKAQEALFIQFAGCRRFVWNWALARKQEQYKTTGKGVGFAALCAELTGLKKQADTAFLKEAHSQVLQQVLRDLDKAFEAFFDKRARFPKFKSRKTCPHAFRITQNVSISGQFVSVPKVGRVRAIIHRPTEGVLKSATIKQEAGAWFVVFVAHVDAPDVAPTCTHPVGLDVGLESFVTLSTGEKVKPPKFYRKGERKLARLNRAFARCQKQSHNRVKAKAKLARHHQKVKNQRSDWLHKLSAQLVGRFDTICIEDLNLKGLVKTKLAKSFSDAGIGEFLRQLEYKAAWNHGQVLKVGRFFPSSKTCSDCGGRANLTLSDREWLCGHCGASHDRDINAAVNILNEALCPERLAATTPK

SEQ ID NO: 3862 - protein, 1771 aa, Pogostemon cablin
MPKPREVKPAYLSYTEFIAWKEDRARRNRRVWSNIALFASLLAVGLEAGLHLCASMLFDPLPDVVTGIAYGWVIFFLWFNRVTLEASSADKPTWNPLVQWLGTKRSAGIALAGTSIAILVAAMATWMFAPFLPFAPVLIPTIIGSLVLVPVLDLVVLIVQFRAIRRLWQAREGDFLDRRVVTGTSLLWFAAGFFLIVRPALIGHWLAQALETTGAEQQKAFRGLRLVHGEQAMLDLTYRRNPPYWVSLGYKGKSDGYWPWVGYGWGSWRTMDARRAYFLMTGTPFESVPRPASFFHQNRWQDDVAIEETGGYVVGRPVPDLSVKTSQMQFTTNARTETAQGTWTLTFRNDNRVEQEARADILLPPGATCDQMHLPLCQMAERSDAIGMEPVDAQAGMPAFRRAYPQRQGRSATRDEQRLRQHIRRIQKPHGKAFPPLLPITDAVGGNHLAAGLPAPARTTLRPDTPESSPDVARPSATRRKCRTRCRQSSAARRPPQSPIPXXXVSEWLSVDYGRATSLRTVPYVTMTFSTNRERRTPTLPHCQGFTPRKSPAFTLIELLVVIAIIALLAAILFPVFAQAREKARSASCLSNVKQIGLAVAMYRQDYDLERCNRKPAKQDDDLRLDERQLRIEPRATQRLLRPGRQAVFGRTGEPTGKAARDSGKVNLRPEIFRGETGLHKPALQLLPGGTDIGLAGYVICPRRSLPDDHERRFTIARHQRAQETLLNDTLAVCREVYNSMVIERTALYETQGKSLSRNDQNKNLTVWKQKFPEMTTVHSQVLQNIAERVDLAFQAFFRRVRNGEKAGYPRLKGKGVYDSITFPQLTTGGCKLVGEYIQVSKIGQIKTIVHRPLVGTPKTCTIRRQAGKWFACFTCEYEPEALPKSEESVGIDVGLEKFAALSDGSFVENPRFFRKDENALAKAQRKQSRQAKGSKARKKANKIVSRIHERIRNRRHNFVHQLARRLVNQYGLIAVEKLNVKGMVKNHALAKSISDASWPQFRSVLTQKAESAVRRIVEVNPAYTSQTCSRCGNVAKKPLKERWHYCPICSLSLDRDTNAAXXXXXXXXXXXXXXXXXXXXXXHGACPRGVFTGFSVLAPRSSRSAKPDANYHTGPPDFVGVSPAVPLLGAGRFRFRLALRIRARRRLVFACLFRAGSVSVGSVELVHTEFERAASLRHDGLGLAPERHTDGRLEVVFRQLAELLLVADYGAGFRVQTQAEQCERVLADLLGFARSEHEALVRGRRQHRGFQAVRFLVGGDVEIAPRERVVPRQQAHHVKCAVNRVEAAPVGGHRSGSECERRLDPQQGQQENLNQTVNRPDAGRSASRLERENHAQDRAPDGPQQNGPLLSSPESGQQIPRRGALGAVLGDILKLELVLRLHRFAVERANRGHFGRCLEAGCGQVSRGLGLEVNRHAVPFAVEDDKTQSATLRGQAGLVQLAHDLNSAFIRTCFLERTIRGQVTDEGGCAERKRYENDGQADPGGGFHCSNSLCAATVAVVGRIPCKLRFPVTGGDAVQPEVQTRQTPRHAPDHQMVTCVEVRVLRVQRRHVFGHDIAQHRGHDRCEQNVGGGDDAALFRVLDARPQHEVGRVNEQQNRDTDLLGVPVPVVAPLRLGEDRPGNRRDETEHGRKGGGDRGFPIVQRVASPGQIAPAVHTGSDGGDHRYHRVWQVQRDHRSKTRHHEALNRLQIMERQHDQKSRGHCKKIFGNLRHKGFIPPQSFQRYSNRSSALGIEMPANDTKTRKSPAPSVHSGICPVAVPTPTAASVP

SEQ ID NO: 3863 - protein, 512 aa, Torulaspora franciscae
MATSTQNQAKKRKTSKKNTSRPFWNEDAAYNSKQWSLNTRLPMAARKLSHKINSDSRFSVNLFDQFLEGNVEKVVWMPTSHLPFKLHRDCMEMTMKALRQTLLNRETNVLEPQEQWLNDYHYDLKDEALRDLVKNYNSNSNMSKFKKTGRLFKLKFKSKKAPVQSLSVLKSTGTGERRPFGAKSYDNILLPKLNYHECSKLTRKSRSSMSALAHCSFHDRLTMKAEQFHGASVHEVEEDFTSKACSSGGNLKDDLGSAKVYSCIKSSSVFDRDFNAAKNIMLNYAIAPYRIKLASLENRLRNWDKKGSPSKLSTMFHLAKGLYNNWNRKEVYSILILGLDNAGKTTFLETLKRNYSLHSKELDKIVPTVGQNVAQIPMSKSCILKFWDVGGQENLRAMWPEYYPQCHGIIFVVDSADRSRIGECNEALKSVIMDEDVEGVPVLMLANKQDRPDAMEVQDIKQIFNQMAEKLDARDSRVLPLSSLTGEGVREAAEWLLIRLQRNKANRPPHYK

SEQ ID NO: 3864 - protein, 445 aa, Torulaspora franciscae
MATFTHNQAKKRKTSKKNTSRPFWNEDAAYYSKQWSLTTMSPLAAGKLGHKIDSDSWFSMVKHPQAPTTNHPLKLPLGSPVKEEIIRARKIQIFPTSSQKERLKKWFGCQRYIYNRALKLHRDGMEMTIKGLRQSLLNKHTNLLGPQEQWLNEFNYDLKDEALRDLVKNYISNMAKFKKTGRLFKLKFKTKKAPAQTLSVLKKHWNKGKKTFYSDIYSSLKLHASEPLPEELPGDSRLQRTRSNKYYLVVPMAGEEIARKSPAEKFIFIDPGVRTFLTGYDSNQTVVEIAKDAVVLIEKLKRRRRQLHKKRQNHRKALQRLAEKISHVVQDMHKKSALFLCKSYDNIFLPKLNYHECSKLTRKSRSSMSTLAHCSFHDRLTMKAEQFDGASVHEVEEDFTSKTYSSCGNLKDELGSAKVYSCIKCFSVFEQGLQRSKEHHAQVYL

SEQ ID NO: 3865 - protein, 482 aa, Torulaspora franciscae
MATSTQNQAKKRKTSKKNTSRPFWNEDAAYYSKQWSLNTMSPLAAGKLGHKIDSDSWFSMVKHPQAPTTNHSLKLPLGSPVKEEIIRARKIQIFPTSSQKETLKKWFGCQRYIYNRALKLHRDVQMTIKGLRQTLLNKDTNLLEPQEQWLNEFNYDLKSEALRDLVKNYNSNMAKFKKTGRPFKLKFRSKKAPVQTLSALKKHWNKGAKSFWSEVFSTSHLRGAEPLPEELPGDSRLQRTRSNKYYLVVPMAGEEIARKSPAEKFIFIDPGVRTFLTGYDSTQTVVEIGKDAVVRIEKLKRRRRQLQSKLFNLRKHKKRQNHRRALHRLDGRISHIVQDMHKKSALFLCRSYDNIFLPKLNYHECSKLTRKSRSSMSTLAHCSFHDRLPMKAEQFDGASVHEVEEDFTSKTCSSCGNLKDDLGSAKVYSCIKCSSVFDRDFNAAKNIMLKYICEHLMASGGSSTSSGGNGRLATMGPGPFVR

SEQ ID NO: 3866 - protein, 486 aa, Torulaspora franciscae
MATSTQNQAKKRKTSKKNTSRPFWNEDAAHYSKQWSLNTMSPLAAGKLGHKIDSDSWFSMVKHPQAPTTNHPLKLPLGSPIKEEITRARKTRIFPTSSQKETLKKWFGCQRYIYNRALKLDQDGMEMTLKGLRQTLLNKNINVLEPQEQWLNEFNYDLKDEALRDLVKNYNSNMTKFKKTGRPFKLKFKTKKAPVQTLRVLKKYWNRGAKSFYSEVFSSSNLRAAEPLPDELPGDSRLLRTRNNNYYLVVPLAGEQINRESAAGKFIFIDPEVRTFLTGYDSTQTVVEIGKNAVVRIEKFKRRRRQLQSKLSKFRKHRKRQNDRKALHRLDGRISHIVQDMHKKSTLFLCRSYDNIFLPELNYHECSKLTRKSRSSMATLAHCSFHDRLTMKAEQFHGASVHEVEEDFTSKTCSSCGNLKDDLGSAKVYSCIKCSSVFDRDFNAAKNIMLKYICEHLMASGGSSTSSAPSGGNGRLATMGPGPFVR

SEQ ID NO: 3867 - protein, 486 aa, Torulaspora franciscae
MATSTQNQAKKRKTSKKNTSRPFWNEDAAHYSKQWSLNTMSPLAAGKLGHKIDSDWWFSMVKHPQAPITNHPLKLPLGSPVKEEIIRARKIQIFPTSSQKGTLKKWFGCQRYIYNRALKMHNDGMLINIKNLREKLLNKKTSVLEQGEQWLNEFNYDLKDEALRDLVKNYTSNMAKFKKTGKVFKLKFRSKKAPVQTLSVLKKHWNRGAKTFWGEVLSTSHLRAAEPLPEELPGDSRLQRTRNNKYYLVVPMAGEEIARKSPAEKFIFIDPGVRTFLTGYDSTQTVVEIGKDAVVRIEKLKRRRRQLLSKLSKLRKHKKRQNHRRALHRLDGRISHIVQDMHKKSALFLCKSYDNIFLPKLNYHECSKLTRKSRSSMSTLAHCCFHDRLTMKAEQFDGASVHEVEEDFTSKTCSSCGNLKDDLGSAKVYSCIKCSSVFDRDFNAAKNIMLKYICEHLMVSGGSSASSAPSGGNGRLATMGPGPFVR

SEQ ID NO: 3868 - protein, 434 aa, Torulaspora franciscae
MTMRKVICDILATKTWSEDQLRLVVSVVKHPQAPTTNHPLKLPLGSDIKRRSSGLVKLGSIRPIRRKNVEEAVWVPALHYNRALKKHNDGMLINMKDEALHDLVKNYSNPGVRALLTVYDSSQTVVEIGKDAVVRIEKLNRRRRQLQSKLSQVRKHWKRQNHRRALHRLDEKISHIVQDMFKKSALFLCKSFDCIFLPKSNYHHCTKLARKSRASMATLAHCSFHNLLTMKAEQFDGATVYEIEEDFTSKTCSTCGNLKDDLGFARQMARFTEDLSMDRVKTELRSLQSRLSSVRPPQEFFNVKNVSKPQNFSELQSRVSYNLKYYSTNYGLIIGALSVYTLLTNILLLFVIVLVFISIAGINKLNGEDLVTPFGSFKTNQLYTALLFVAVPLGFLASPISTLLWLIGASAVTVFGHASLLEKPIETVFEEETV

SEQ ID NO: 3869 - protein, 300 aa, Torulaspora franciscae
MEPQYDVPMAARKLVIRSTATRGFSVVKHPQVNYQPLIKLPFSSGVKEEITRACNIRIFPTSSQKEALKKWFGCQRYIYNRALKLHRDGMEMTIKGLRQSLLNKDTNILKLQEKWLKDYHYALKDEALRDLVKNHNSNIAKFKKTGRPFKLRSKRRQFKPFRCWKSTGTREERRFVAHGIITTTTAVRSSVATLAHCSFHDRLTMKAEQFDGTSVHEVEEDYTSKTCSGCGNLKDDLGSAKVYSCIKCSSVFDRGFNATKNIMLKYICEHLMASGGSSTSSVPSGGNDRLATMGPGPFVR

SEQ ID NO: 3870 - protein, 474 aa, Lipomyces sp.
MQHAISETNSTGNGQPSGSDTRKKFWTEVTRGLSQEWPLVCGTSVSGSSRSVESHSWFSIEVHPQTAAPAPNSRKSFLPSLLTSDEQQSADGNDDDDDDKLRARKIRLFPTTSQKETLRQWFGAQRYIYNKCVALQQGGMKPTLKELRAVLLNSKTNQLNDSEKWLEQYEYDLKDEAIRDFMKNYKSNMAKYKETKRQFTLKARSKYAPTQSLSVLKKKWNHKMGFYSSIFSPSNMSAAEQLPTKLERDSRLLRTHSGKYFLMSPSPARKDDGKGKTTGDFVFIDPGVRTFLTCYDSNENVVEVGKDAVVRVSKLLHRRRKLQSRLAVLRDHKKRQNLRRAYIRLGERINHLIEDMHKKAARFLCANYDRVFLPKLNVHKCQKLNRKSKASMATLGHCAFFDRTALKAELFERTQVVEVVEEWTSKTCSCCGWVNHNLGRSKVFECKRCTSVFDRDFNACKNIMLKYFTEQSAR

SEQ ID NO: 3871 - protein, 1781 aa, Brevipalpus yothersi
MDGTKIETSDATSTTNPTSSNINTSTVDNTIAPTPTSCVAAVSGNNTAITTVTTTDTAVITSSVSTTPANSAVTVKSSSISTPPNVSVSATRAKKNGPRHHYETFGIFDWDEYLKNTGGVPAPAECFKQHIDPPKNEFKIKMKLEARDPRNQSSTCIATVVGLMGSRISLRLDGSDNTNDFWEMVDSSNIKPIGHCEKNGDMLQPPLGFQKNPSHWHVFVAQTLADAEHAPESAFKPEPLIPPCNYFKVGMKLEAVDRKNLRLICPATVGDVDGDQIFVTFDGWKGAFDYWCSYDSRDIFPVGYCRKSGHPLQPPGSKTPVSPREAKLLDVANPNAAPIAFLPKKSNIANGSAFTKNLKPSSTKSSTTSVTSTNPSPNTPSTSHSQSKSNTKSASYSHPQKISNEKASAFRMSHPATNESANQKTRREESGSKQPSGKLNSIQDKKTSNPMSSTPEMMSNSPSVTAHLNKSCYCGPHLDPAKIAALNPSYGPAALDTAMKILLQWILSAAKTQNDKAIVYRAIKEGNGQQYVSTNVKDVQYRIKLPHFNKNSLFWSYFKQFAKAIKCCPKLVTSTPREGICDMCSTLTKPASNINRVITSSTLNPQSHASTGTISNPSMRVGPLSNSSASQSNLKAPSNDQPHGFTPPSTSTPNSLGSQNSKKGIYPQSSDAGQSQPKNTSIVKRKRSDDMNDPPPKIGPASKMQLETNGNPSRNPKSNNQSSNTSVNGGKPKTSSMAISDPTNWNTEDVINYLTSIDPALKIHADMFRSHILSDYRSIFQSDEYVASLHLPTFDAHLTELSDDQATGLNKAGPNYYRHSDDSSSSSDGDKNRKRKNISNTTTSVSTKKRKRSECGVDGPSEDQPSTSSSSPSSSQVRGGRGGKRKRKNSNDVHEIEDSTNVTNTKEGKIFDTICCSLNQFLGITDKKGERVALTPEQEEFMMKIHHHINSGCELVSKVMVEGARYVRYHLEKQLAPPPNSTPEQCESNHDPWQSFCPKIMLKTLRVEKDESSGKKIKVREEMKNGQIDFVYLFKCLTEPTKKSKREFVLESEYKAKRDQYSLPLYPILKEKLDNQLSYNIQLYSQVFDNNITLNVRKWIKKVFRNESKKLKLNLNYKVIMATVAHLFDGGGGGGGTANSNSHFGGYVPVEPNQDLIKFFVDKFKMNNERLEQLKEFNQHRFKLIPLIYLLRKYFLDNDMRRPPKISPELKYGRKSIRYDTRALFQMFNSFKWNNGEKPRNVKEFEEKRHEWWPKYFKYEQFETSKRKFNYSFTTDGVKCCLMMVKWKVRPDGTIPSVPPNAPKDKKERKFTTASTAAKSNKDAGKTKKSRESKKVPIRDGNSAIIINDDDDDDGKIPESEFSHIVGLDPGMKLSFGGSCRSDRLIRDQDSGESKIVEHETPIKISCAAYHQKCRVVYDRVKKKKRKKKKTRKNRAKPQNSGGGGGARQNSGKSGNIAKSGPKKKLHQATRELYEETNHDKPDKSDSIDDFLSNFTKLQDFHAKRVFAKRKFTAYIRRTRAIQWMCEELVYGQIFRKNFNNTRPRKKWRALIFIGGCNNFYSGMKGYRGVPLKAIVERLKRDWSRKCVVIDNVDEYNTSQKCSQCHSKVNMPPPRRWPPANNGEEKLVPMDIWNKSKRKRKRRRIKKKKVKDELKQQSAHLSQPSQPLQPTESTAHSLPQPVSDSKRRRGRQRLRGHRYVVCQNEKCPRYHCGATTWNRDVNAGRNIATVGLAEYRGEERPKAFQRECQSNKPPNQVPPPNEVNGIGSARPLVVDQPCPPG

SEQ ID NO: 3872 - protein, 340 aa, Procavia capensis
MCRDMTQLKKTQGYEWLKKADHNSLQRAIRQLDLAYQSFFRNVKKKGVAPGYPSFKTKKNARQSYTSPASASKQYISRKTGEIRKQESSVVLYDNRIKLPKLGLVRCRVSKKVTGRILSATVIRSASGKYYVSVVFTEQEKWQILKTGKAVGIHMGTEYLITTSDGMELMNPRYFRQSAKKIARLQKELSRKAKGSKNFERSRRKLSKKYEHIHHQKMDMMQKLTTKLIREYDVICIRNEAVAEMKKRRRFSKQLADAGWGELIRQLSYKAEWYGKELIKVEPSYPNVRICSGCGYEYPLISRQRTIQEWYCPKCHIRHKRNVNAAVNILQEGMKLKEAM

SEQ ID NO: 3873 - protein, 416 aa, Characiochloris sp. AAM3
MPFFSKSTSVPACDLELGAPAASPEGQSMLKASAKLLALVVLLTMGVFMLPLLCDLGGSALMAIWPLVMTASEGASVFSRTGEESIGVGAIVVATALLAFGARLCYMSQQGHLPAGGTPWAPCAAIDKLDSPHHPPQRSIFKVPAMRVPLLARTAVVDDPTPIKRPFARFAQVKELLSSMPPVRDFGVASKLVRSRYISDALYVSRPVAFGAFAGRSIMVSGILGYYISSNYRQRTLGVYEQRQRAMEGLAHSLTRGAPRESTLIFYGNKSCGGGGCITSWMGGGPHKAFRQVLNRHAMVVTVDEHLTSQFCSGCVGASIAGDLQAAGLQPQPERRRQTATAPPHRGHQIVQQRNEDKLSGLTKFGGRIVKASYKVFRTAPLCCVLRHNKLSHNSKRSRLWNTRDWSRTRLRQSKR

SEQ ID NO: 3874 - protein, 227 aa, Characiochloris sp. AAM3
MMAYVRYVAWALGRNGILDQYHEPPREWRTGDALNKPHSAAGPAQQTCPASSKRGYRHRRLRVNIQRDRELDAIVNHVTRDCGGQRQDTVCYWGNWHGTVGGPISRQMGGPPVQQLKRRMDCRVLTIETDEHKTSTYCARCIDAYALPAGVPRLPASTRKGAAPAVPQPSNPPQQLLKLRTCNQRLEKCSHCKVVMHHDAVGSANIHHVGRCQARDKPRPVPLQRTS

SEQ ID NO: 3875 - protein, 325 aa, Tuta absoluta
MRRYSWLKEYDSLALQQAVINLDKAFANFFNKKLKARFPVFISKHGQQSSYHPNGKVLTNAIQLPKIPPIRASIHREIIGKVSSITITRNATGKYYASILADDGQKAAAKPTYITSVTGYDLGLSHYLIDNAGSKVANPRHLVNAYRRLRRDSKAISRKKLGSANRRKARIRLAAQHERVANARADFQHKLSRRIIDENQAVIVETLKSANMMKNRRLSRHIGDAAWSGFVAKLAYKAESAGVHLVKLDQWFASSKTCHCCGQKMPEMPLKVREWKCPGCNADHDRDINAAINIQHKDITELMAAGHVVKAHRGLRKSGSTPVAA

SEQ ID NO: 3876 - protein, 1401 aa, Drosophila neonasuta
MDWLCSAWRTRYNQLRSQRSRYDSSHNLVPIGKAVDTRTVKQVRQDCSWLTAVPTLVIESPSKIERTHWFAAAQRRKTLRAQGNHPGSMPRFRSRKRDDDVFTCWFNGGRNARFEMVNRNHGIVTVSGKNPPAKRLAGDKSGFRIRLHVRVSEPIRDYTSVQVNWTKRTLVFTNSPAPVDRQPTGKLVGFDRGVVHQAATSDGSFVDLPRKRLRGIDREVRRRQKAQARSLKASGHTSQREYRKAGVSNRFAAHDQEVARLKDTARRIVLDVQHKVSRSLVENYDVIVLEDLNLKAMLRSPNAKPDLLNPGRFLPNGKAAKRGLNRVLSTASMARLGELVEYKAEACGVTVVAVDPKNTSRHCPRCGHTGKGNRESQAVFSCTSCGFSSNADSVAAVNIATRGVEKLQGGAHPGVEVSKPELEFTESSVRLTCEAQTSGRTAVTSALDLLAVCVPLASCTAAVGCFRKSSRFFRGAGERPDTELELSREGDRWAAATVLCTGGIWPPDAPGVLVSADTCRLASDLGVEPAWLRFCVAEEINRFACDPQRYRPRTGTNGRGAAIADLPVGVLQEVLEASGLYRAVQEAQRLQPELVSGAEDRARQNLSYACADVDYFRELAEGPWSPVSELDTEEDLARYLRRQIRCGELLEAGARGLMSGARFNPELEHPVEYHRWGVRAFGRTLRTGPVSSATAFAASAGFVTYRISEIPEHRVHHDVPRADFLDRGLGEFLLDSASDVVWNISEVARAFLGFPALDPAAAHWWDVGVPTLVVPLLVVLALFVLPRGLFHAFSGPDVSYIVDGREGVGSVACLSPDLPERKDLDLASLASRWLGWGIYGDVAEDEQDNPASDNAVSGVPAGPYLRGRMAHAPTPVVDVQSLQERYDAVFGEYTRTELDPKTLLEGPAILDVGYPTTAAFHDALSAAQNALEADPVDPAAVEKAVEVMESAWVTAMDAAYEVGVSGMDMRKARRMDGVWATATAPAGVSDTERRKAIDAAMSYLSEVRDAHGVHLSVTSMTTDMSEVIQTDDRGRASLGADLANRLFIRCDLTDGGVELIPAEVVPAGRPYSDLNKLFDDVCADSDVLHDTRPLQKKAGPGRPRALNDSQVRRIASAPEGTSAAELGEALGVSARTVRRYRALLRDELTNLMLSFDLETTGVDVNHDRPVTSSLVTLFPDGTHTSVDWIANPGMPSHPQAAKVHGYSDAYLAEHGEDLGEVLARTIAGLREAWAAGCPVVVYNAAFDLSMLSALEPTFTVDGPVIDPMVLDKAVDPFRKGARKLVPTANLYGVAFSEDDAHDSSADALAAGFLARELVTRVLPADHRSPADVNRGYSGIDYTFAEAAGDVDLLMDLQERVRRSSMDHLRGYFDSVGKPHDGCDGGWPVQDSTVAARQAAAQ

SEQ ID NO: 3877 - protein, 1624 aa, Drosophila neonasuta
MARTPIQGFDGHLLRMTREQASLSRPDLAREIGVTDQSLKMWEIGGVSPSPKVYVRLTDYFGKDRWFFAPVPVSERTLLDYRQRAGISSPELSRCLGVPVARIRTIEDGERPTLTADQIARWAHEIGISVAGWYQVHLQRESSDPRAHCASARDAFLGVSVTTAVTGSVNTAGHRPTSTLSGRPQSCTTKTRVHRTRRVCTPRLGGELVGVALRLLDPTPSTTSDGSDAEDRDLTPRTTDEWDEVNEVAKSLAGITNCSRMALHARHRRGEIAAWNRVIELPPDYAAAVDQLEATAPAMIAELTESRAELDPAITALNAHQTSPTSWSLPVPDDADRGVWAGRDHWLACAEDACDAARERDLRPLQASPHTTRALLRARADFFDVNGRGCTASAETIVTRAIERHGATIAVSTGLTRLRAINRVLTDAGLLTVHNYGRHLRRIERMAATTWHGHTQTRAGSVHPATDEHAVNCGNPESSTYSVAYGLLSPSGSRRGAHASAQARADTERLHQTRPKNGEKTAKSARRGRGAQSTVISLRARRIADDLTRHDTTNPLASGPYAHLCGARPSADGDKTPQMTVTALARLIDRLTPSWAGTRDVLAGLVHAATSPTTGYVALGLHTRPTNPIAWMTTVLSRIDWTHPDDFPAWWKVTEAHGLHCITPTSTGSGDQQEQEGAEHAMTTTPTPATASHGTPSPDTPVRLRGYRYRLSPNDRQQAALAQLAGASRVAYNTLVGHNLDAQRRRRALHDRLTADGVDDKVAWQQVKTAAKTDDTLQLTTSYQKAATTIIGPEITRHRDAAHRIAAGEAPDTVWPDTERYATPWLHTVPRRVLVSGLQDAAKAFRNYFDSLTGKRAGRPVGFPRFKRKGKARDSWTIPRPEAMGPKDAERGIYHRSVDGHAGPITDYHHIRLASLGVIRVESSTKRLSRALRRGAELRSFTISEAAGYWYVSLLAAEPDNRRVEPTRRQKDGGAVGIDLGVSKLMSFDNGTVIDNPRLLAQDDRRIARTQRKIDRAVPGSVGHDRLKRRLARHQHRLAARRKGLIHETTAALVDSTTLIAIEDLNVAGMTASARGTIDNPGKNVAAKAGLNRSILDASFGEIRRQLTYKAPEHGVDLVPVDRFFPSSQTCSQCGSKTKISLATRTYRCGTCGMILDRDVNAARNIINFALTTRANITTRRFTVIITVANTKGGVGKTTTTIYLAEAFARQGLNARVIDMDPQGSATRWYDYAVEAGEPAWTVENLTEYRLKQISDSERPTIIDCPPGDPRIFTVAVNLADIVVIPCKPSPDDYDRTQITYDTVPDGKAVVLVNDARLRTRALDQLVGDLDNPSDTTREPFQRFDTIVTHREHVVHANGTVPDRLNGFDDRNAHRDESPAPTSELLPKAKDDRVILGFRISEDKRRAFRTKATQEDTTVQAVLTEAVDRFLADDTVQPNKRAETTISIEGLPRPQQIVIIWSHNRTPDALAELTAGTRVIFAAKEDTLTQRTDDDETTGAVVTVLVAVGLFYDIITDDRDATDIYTSIEPRPLTFSGTVATVETVGKNRGITLVMPRHGQAQPIETRWPADIADSVADIRPGDEITVEAGERSLSWRVSIDDLGRRAVVPVVTATALATSTILS

SEQ ID NO: 3878 - protein, 1441 aa, Lichtheimia ramosa
MSCDTLARNPILYQNVPFHTLQTDRAQTGLPTVNNPMLYTSHANDNQDQFQYLAGFMADKPSIRDFMLRARADWNEMYRTDNMDPPDLPAIRNRKALVESLAKQMDTNFKTNVVTHFIARTQAFIAAAMTTIADIPDGWPELVDEIPLVPRQFNEMFYHTIIQGVNAANAQNFRQQIMTMQNQMNGEADVDLVESAVTFVNRLRNKRLHANIHNPINYIQVQEELREFAKRPREWPNHNALPLYILANIFYIPFLYADASVESIIDDNACREVHQLVLGLEPPVQREIKQFIRDLRLQLENAAYNWHIGIRVRPLNRNQADDSTSREIPIDIFDCLGLPRPSLIQRTQHLFVDVEPEDPHFARWEQNWNGHWITRLRESVEYFDRELLQLFARWDRANRLTGVRDNLQNNQVIEMEDLHVNVFEGEWEAAGVRLLNRQQRFQVMLDLLENFYQKTMNYIHGAIYDEICRWYSLWDASKSYMLELRDVLYDVHDDAVLQRIQRLNDIVEQYQQDIDRRWREEMDLYTRHVRQMDQALLQRYQQITNRIPNVLPRDENGEILDTPAVQAEYNFWRDILHERYLDFERFCVNIQEPVYNVMIDRTNNFYDALEDIQVAIHGILVLLEDDLEQAEENQEAQEDEDPMIVEEEEEEDRDMDQAQEESSNGFRSHALIPMLAMMLDRYPDQLSFRLCPMGQSGAIFIPVNSRIGKEILQNIDYFAQGLPNYEALGPEIRTLQDCVKLSRLTSISGNTFAIPLPTATRRTLHDIITESIARLMLPQHVAPLYDDLPNEVDITDLHQQMILMTREFGGGGLQDEDGNLIFNDNTRARVLYASQLYCNQMLIIRMLRIRTLLRCRIITLHVPGNDLNATWTPPLFDIDVNEWDRMLRAYNGYYNPHIGLDDFTQAYVHCYNRVFLERLITIAYNANNQIPLQVSTIGEYLDQWQSGNLAVTRNHLIRNWDPYAFLISPEYHSSVSIDGNVAIKHSKYYRDLHQTIPGVDNIVYPRYTIERLMTDGVQLKIVMRDWGRRSTRFTGNPVRYIPEVRKKRHRLLEESHLRPDQPVNIRNINNELNQRIDLLRQRGYRGVIGIDLGETYAAGAFYLPQDGGTGVQTTIKRNELYGRTRNNASMLEHETRRLGIDDITSQLSRGSTTSDLQSLNRYIQNFQVDNHGITLNNFYSRRSFLHRRNSNRLSMKSALDKACSRVLSMNHISTNAPDEEDHRRQIEAHREPLIAYNNVRMVPWEQGIALQRQILQQEQELEAQATQRRLQRIERRQNMTPQQREQRAFVRRMKRRRQRRRPRPSRIVVALGMDGMREGNQRRGALASMDLTFATKLNKIASSKGCLVVRCDEYMTSKMCPRCAMDNITTRMEYLTVPIPGTDQHRQSIRVLVCDRCQVWYHRDGAAAHNIANNSTAYLRYGQRVPINIRRSRRVQGFRYQ

SEQ ID NO: 3879 - protein, 1523 aa, Lichtheimia ramosa
MLQDIVAEPLLHAYLQSQGPPDAEVFNNLIQQFMGQVMENLNNLRNSVIHNGGRQLHICLVIDGDALPAKAPTHETRRARQNNAFHIATKHHNHRRRKGKKWFSFRRSARNWISFTPAIKDAIRHYLQTNGTGTYADTFLNVPHGQHRPAFSFHTAMFEADPEVVFLSQHVPENDLPAILSQDGDLFAYNGAIDVMRIVKIKWDIQQEYPGQITTKRHLFNELGLLSDTPAILQQSEVRFACLAATCGNDYAENVKLVSFVRIAKLLHDIGYQSQLVPAHDFLETLLSRFTSTVTWYQRFRFRVAVSQFCTPMVSDIIPGLQDGFHIGTPIAIENDMFYYLGVPGAPNPLAVQEPAHPQPEQPQQPEHHMQGPVLRLIPAMTDDQLLAIQGSLAQERWDGVPGAESSGDDNDTTGGGGPATGVFKAYNKTKDNVKRLLPKTYDPDRPTKKIKTHGQFGQATQTASSSKTSKQKSKKSKPRSSVIPPDETLDTDLMPTKIKFQVFDQDQNRHVPMSFKQNSRKITTMQAGLYSSVLGAAKFWNDVHRESLSGGQHITEQQSDAYAIAEAELWQKLISSIAKDMSYARFVALHILNIAQHVAYHSLDNETMLDFFRVFFTSDISELRSLWRFILYCGMDYQPATRGATKAEIRESQQHPYSDDITILAMDGSLLGDERINLHNLKAFEGDIVYLHLSKLMKVNPVIRNVFLLARKHWYLDCHEEMINRAPASVYRSQLLDVMVTNLINVYQLNVVKNFHWRYCRFIERLLKETARVPIGWPSNDDFIQQITNHVIQGGNTNFIDEIDGFATDGAREDAKQFVQQLIDRRGTSDPTSQDHVFNIHKCTQELINKATIPDQWPGPKDALVGYLFYRIWGVSLRSMEDAEDEAEEEEQIHNRVQQLPEAIRNDIDNFVQTQRGVQVAGIPIADTNIHVLLGVTGQPVELQTDEGELYTAGVSQHPREGMDHVDDDQEEEDEEYIGDITACSEDTGWLVPVMIHMLESCPEGLSFGVSPLAANHTIAIPFTVGALTDILNHMGYFTDPLINPFNIIADDNTKPDVERNQARQKAQSLLAARFRIEDRARAQSLSPPTLHPVHGFQAVTRQVGGIFRPNPPQPRNEQDIPRRYLEGLPKNKNVWDGAIDSIFDIRWRGEVVSVGGQQRVWKYKRNGYARMLRRRFFLDPNKPRYTTRRIFMSDGIRIWQMWNDWNTRARENQTPRYLKEIRRTSREDIQVAHGVDETANLLDYYCGVIGIDIGEVCTAASVFLPSDHTVNGSRMIVKRGYLYGRVIPNVQWLEKRRNTYYIHNIEDGLSLGSPRSSFANLTIYLAALKTDAAVIQLFDFYSARAVRRRLWDNHLSTRSAMDRACHLIMEQSTRTLHENVGYGPHRPTIFALGLDGLSRKSRKGALAPMDHKLSRHLFQRIRQQAHPASITITRIDEYLSSKTCCNCSMNGLNSRVQFLNYPATPYAPQRQSYRVVVCNTCHQRLHRDGNAAHNLALDTWCILRWRQRPHQRIRPSRRLQQ

SEQ ID NO: 3880 - protein, 762 aa, Lichtheimia ramosa
MSTTMTNQPFNPTVSRKNEKVPCDCGAEIVHYRRSHHACLYNIRNQQQSMDWSPDFYPEYFSVNIGLKTIIKSDELLLHIQDAVRRSNSIRFEASRLAYLYITQHVHDISNDTGFEGNPFQSNLYSHCQQAVSITTQQGRPNVATYLEAAWRCYYDIRGSSEWTSRSHITQILQYDANMMCENAKINIYYHFQTRLSRYLRLRISHVEDIVSRIGYKGIADLAEYVMNEVWKEDDDNDQEMTWRPIQSADQFFETINLDMTIAQRQSVFEVYTTIIQGIGEELMPLNTEKVEEHVEQVFKFHIKMLEFIEEVPAAVKQKSPASKVTKRWCSRKVANLHTKWGTEPILPSKQTIRIAECELYNCIQHKRPFEANQRLSDKLTKESLEKLSTKAANTISKIESNNFAPSTFTQSRFWNRLYSILPMTSFTTSHIMIDTVGLQQVSRSPKLEDVGAGASNLWEQFFDVSLLQGVSGVMKRFDHYITTDGVKASFKCVRPKRSITEDTITTTAITSRPIWGLDPGIRSIATLANNCSISESTCPPYSIKLSANQYHHLSFHHQSTNNLLQRMRHQPTVIEHQKKIGIHKTSKNESYIQYLQSIYEDGRWLQLLDFHQENREDNWRCFRYRQRTLAQFTNHIFDCSQGASNKKDVVIAYGDARLNHAMRSHKPVPVKRLPKVLSTQMTVKYVNEFRTSQICSQLCDDEYIPMDNAIDNESGDMIYAVKYCENCKIYWDRDANAARNILYRFLCEECFNDVDARFSRK

SEQ ID NO: 3881 - protein, 743 aa, Lichtheimia ramosa
MRRIGAAVIKGKRLKVITKLYERLQEVLNVSVSKESTSSTVPESDDDDDDFDPLYILGAEDEDGDDGDDQVSEETDKKESTAKTIRSLVAIIKRLLYSDQDGDAFTAEDVSKLAFKGTELSDEEARAAADIANFLNPFIPKKDALEDISVFNAIQIATITNTVVSLVQPQQKKWKLSPKSSQSRGLPLSAASLYQLLRKGYEIPSGDTGEFITNVNQARKSKEELFQAFFDVDKMKQFLKRRGLEPYWRLVYVDRWRVRVVGKKVVTRMVEIKLQKPSTSKKQHHGRRKKKKRKSSGSGVSKRKAEDDHDRKKRHKTEHDDKLKVLEKELKEVRSELSKERKEQTKLERIRADKGRQFRQGKKSGNWDGLLYAELQNARKEVNSHYLKMDSLKERSSQLSQQLYEMQRGVYLKDTKRETKQDEPRRKATNVIQDHVKGERRLGLTGTDPGIVTTATIALVSPQQQIDKIQKYATEQQPVEPTTSTSTKAPASHSSTERQQPAQQSQDQASKPVTAAVLNLTSSVLSDRVFSTVHRQQREWRKKKNIQTTDKKRAKQARTREIRSKRFYSKFGSRVRRKAVATDNTNKKQRSSVLHFYGSWTGRNSRIKGHSRQGSQQKMQQRMNCPENDHVLVIDEFNTTKTCGSCLHRVELQWQRQEDGTFRRCKGAVNCGNPRCPLRLDSNQTTKGRDSSGANNIALSGLSMLMSQDSKPLPVFQRGAYTTAYQLAEPFEPTNIIGASTGH

SEQ ID NO: 3882 - protein, 1943 aa, Lichtheimia ramosa
MEVIFLWVGWFGWVCAAEQDTIHSHVISFVSTDSSSRSCSRTMSAHEQASNEQPIHGVLTYKWAEYPVTLEVFPKNVADLKARCANAAEFNKVPGTNEVFKEQERRLREMGLRVEKAATDTHDCASTVLSMLNGSTKSAINLVVGNTALPVHGDQLVFAISNLAQVDIFYFSTRMQPRLISPQVPRLKPQSRPCIAVLHHVDSYAGTSQWFNICVDESKTNVPLKSQRTSSVIKSYPTPPAFSRSDTGSAKARKAYLKTDITNEQLTSTLETHLERHISNLYQQKVVDGDEKFDEFFQKQLKLKNLPSVKQAVYNDLFGDDTDKHPGASWLSKNVKKIDGYDAISRYRNIVTTFQHQQKELEEGLEKRASDSSSSSSSSGSSSGDDQDVSRQQEGNKKTIQETKIETATMSLKALLRTDVAFDDIQRILEEEKSRLAMDFQSLSTCVDKLVDMLSKGELNQLCGYDQPVSSEIDIKDVAKDFDFGEGVSTAIAVVPVQSNTSKYQDQKLFEYEHFSNLLSGCVANSVNEAKERSIYKEIRRLLIPKLDQSDKNHQQFWFNQAVSDMLTEFTTSFKKMWSRSRFERDLRVCLLGLLRVRLAPERLRRYIARRKQKSTATATATATATTATATATTATATATTATATATTTATATATATTTTTRYRKQTIRSIMRRIGAAVIKGKRLKVITKLYERLQEVLNVSVSKESTSSTVPESDDDDDFDPLYILGAEDEDGDDGDDQDSEEAEKIKESTAKTIRSLVAIIKRLLYSGKDGDAFTAEDVRKVAFKGTELSDEEARAAADIANFLNPFIPKKDALEDISVFNAIQIATITNTVVSLVQPQQKEWKLSPKSSQSRGLPLSAASLYQLLRKGYEIPSGDTGEFITNVNQARKSKEELFQAFFDVDKMKQFLKRRGLEPYWRLVYVDRWRVRVVGKKVVTRMVEIKLQKPSTSKKQHHGRRKKKKRKSSGSGVSKRKAEDDHDRKKRHKTEHDDKLKVLEKELKEVRSELSKERKEQTKLERIRADKGRQFRQGKKSGNWAGLLYAELQNARKEVNSHYLKMDSLKERSSQLSQQLYEMQRGVYLKDTKRETKQDEPRRKATNVIQDHVKGERRLGLTGTDPGIVTTATIALVSPQQQIDKIQKYATEQQPVEPTISTSTKAPASHSSTERQQPTQQSQDPSSKPVTAAVLNLTSNVLSDRVFSTVHRQQREWRKKKNIQTTDKKRAKQARTREIRSKRFYSKFGSRVRRKAVATDNTNKKQRSSVLHFYGSWTGRNSRIKGHSRQGSQQKMQQRMNCPENDHVLVIDEFNTTKTCGSCLHRVELQWQRQEDGTFRRCKGAVNCGNPRCPLRLDSNQTTKGRDSSGANNIAFVGRTQQHINLLNHLNQQTSLGPVLAIDGDHVPICGQNFGTSRIFLWLHFIDAPSLSHTHPFVMPALVTLDQPIGTSCTSDALTKLIQIVVRSRLGTHYVCGQDHGPGDLCCFALHHQGESFSLILNTQQKNGSLLERWILSVDSSKTPSIRHNDESTSGMMMKQQQQQQDNKDSGSHDMILLLQSVYSYTRMMPVHTMVMNNSMNKSELAITMRHSATGLSCFSHSPSPVEFSHDAHLQTHHFQPTFVNSIGTVSLEVVYAEKRTTTEPVVVTMRRLSRLSLSAMDMSEEDTSTNPNASPNNNPLASMPIPTPRMQYTRRSSIAYSTSPSSSLRGVSISNNSNNNNNNTGSFMFAALGNNSINNMLTANNNNNNNNSNPRRRCSLGGAESFVGSYEESLLSGRMSTVPSKPIVFQAQIGVLGHGDCTPKCPPHRTILFPAFFYESDASLPSPYVGTVELTKRYRVPAKGQLQIVIKNPNKTAVKLFLIPYDVLNMPPNTKTFLRQKSYAGGLRYAIHLQLCRTEKKRVYLYKHFRVVFANRISDARETLKVTCEGPFDYVPLTQADREFLSSK

SEQ ID NO: 3883 - protein, 222 aa, Lichtheimia ramosa
MKGYCKGFLYGKSIPNRDWLLNRKAHQDIEALESILSEGSTRSGFKSYTTYIKALREGNRGNMLFTFYSTTAVRPVTDAESNKSVLFGFGLDGIRKTARKGTRRSKDTTLANKLHAKIKQGNNHHTTRVCEYNTTKMCCHCVKRVKTTKTGYLQRIIPSNPNTMQQSFRVLVCYKCHHVKHRDGNAADNQAIILKQCCNTTNDHNTSFLLIVALLLHHNEHF

SEQ ID NO: 3884 - protein, 934 aa, Lichtheimia ramosa
MSCAILRTNQKKSTTSRKDPSLPLATCTQIRDAEYEDRLTRIIISTAIDKRARLKAELQQKQLPNGTNVNIVNRLAAQGVNTTCTALLATFPTEFTKERWVQFIQHNFDRIYNLHRQTPTPTKSKSSSSTYEEITVVQMPANRLLNVNLGEDERKIFKDLLVKAATNITDTIATVALAGRLHIINYAKTGLPVQKYSQQSQQYLPIKTLCPEAAVRDTSQLHDHKMIPVIPTHHRIAEFMERDKDIEEFLSMNHLSFILNNINNQQEKDKHTTWQACLKNIALSPSYIMNSNSHLKSSAVRQLATNVSNMWRKKDLYWRLLGHTSRLLIRLHLAPTREKRRYLKISGAKDYDHAQLIEQGVSAGDLNTTMDMTAKRHGLDQAEVNVINHLAKVIGPFASTKADHPVYTIPMIMLCVHLLSACGYSMFVQSIFPTISAASIHSIDLNQLTLYQITSERFIVPISDSAIMSSINDARDLPDRIFSAFFNMDYIENHDIKKSSIDTTCAPRIEWDDESGPIELKRLQNEKQKHQKKLRTLQQDIAKAKLDHRTTPMKSSHEEDTIHILKIARAHTYDVIDRLSNDISDLNIAKYASSKKKEANKQPDKDSKRLVVKYDTTGVAGARELDARELCKDVAFAGTDRGVVQMSVTVPVSIDRIQRHVDFFNGDFDAKDMTPEQDLQLIKVPKAYVMTAKGLDNECGTSRHMNKMRQWKEHSNDVALLERSIVSRNQLTMEGVNSYNKVYSDVKSRLRDFYFSRRCRAINRTKLYRTRRGYERAAVKERRYVMKSVPSKKVIHCIGDQGTGVGSRIRGHRRRGGKIFERLHGKYTTVAITDEFRTTKLCPYCFKTCVHPSYTKVLPGGKTISKRRLGASLCVNPNCPAKKFHYTTRPRDGQAALSIALVGASTMLNDDPQPLPPFNRVNTNKKKHKIANMP

SEQ ID NO: 3885 - protein, 267 aa, Lichtheimia ramosa
MNNILIPFDVASSGDASTKVDLTPIVFIGNDIVGGQQFYTQIEEDDLFEQLQQQQQQQHTQSLDAIEISIAEIESNLPPRRVASQHQYLIYLVQLLRFLPTLLQHYDDRYNILRWNAYQARQQVHDEIVNIFVNGGVKYAKSSQELVFKSRKWRQAPFSQSNKIPVIAFGSGRWKRQRGSLPGLAGVCFHVLKKAEREGKVVVAMVNEAYTSKVNVPVNSNAYTLHSALYCTQCQRVWNRDVMASKSIYEIGNELARHNTRPSHFKK

SEQ ID NO: 3886 - protein, 388 aa, Ursus thibetanus
MLVLKKAYKTEVLLTTDQQQKVHRTIGVCRYVYNLYLETAQNHYKETKKHLSGYDFSKWLNNIHTKQTDHWIKDVSSKAVKQAIMNGDRAFKNFFKGIAKFPRFKKKRNQDVKAYFPKNNPTDLTVERHRIKIPTFGWVRLKEFGYIPAGATATSCTISQKAGRYYVSVLCTVNKNRAVYESKSAGIGGDLGLHKFLVCSNHLVFENINKQQRTIKLEKQLKRAQRKLSRSYEQNKNRKRGEFCAENRQKQLIVVQKLHARLANIRKEYIRFVVSVLVKTKPAYVAIEDLNIKGMMKNRYLSRAIAGQRFYQFREWLIAKCLEIGIEVRLVNRWFPSSKLCSSCGDKNISLSLADRMFTCDNCGTEMDRDFNASLNLTYTKEYTVVTE

SEQ ID NO: 3887 - protein, 1002 aa, unidentified
  source 1..1002: note = Saccharomyces
MWWKSDDQSNWYAALEKSCRYLEGKGDEYGIRKVTQLAKAGSIQTASYGEENYIGGTSASPIVFRSNNGPREVEPDQLHDSFTAYWAPLLANDLSDLVNSTLSEMTAIEEPESPCYSIPNGVTPESCTPVKQVMFQTNVPFSYLNLTGENHFYMKEFYNEFSNVILPFQASSDGIMINPVRDILIIYARESHYLLYALLACGARSSHRKSSLPEDQSSYKLYLRRCLETLTAVMERDMMGSLDSILLTILVLTCDSASHTRQEWRAHLRGAKDLLSKNDTQKTHSMIFLLCKSWYSSIEILAGLVSPKGGTLRTGEELDLLICNRSEEVTTLRKLNIVSEEGFSLFHGYSMELVVIIKDLIKILRREGKSQQDYCAITELISSVRKQLDFELIDKSGIVPNTHPCYPKKINENDSSFSNNISVTYVDGRKLTLSWSDISHRSYALAALLTIFTKLLNIDKGNAFVQSMVKDLISTACCYDGAGGFLKSHCYFVLQWPMLVAGTNSIIEEHKARVETFFRLVAQLGSGSAGFALARLRRIWSNGPAAENETAVGIDMLSQQWGLDVKNSLAGERKGEKIESNSWFTIVKHKQVLITNDSLDLPLKVHIEKELTRARHIRLYPTTSQQETLRKWFGTQRYVYNRALKLHHEGQPMNIKTLRQMLINKDINILEPHEQWLKEYNYDLKSEALRDLVKNYSSNMARYKSTGTPFKLKFKSEKAKTQSLSVLKKYWNNKKSFYSDVFSSTKMRSAEKLPEQLLMDSRLQRTRHNHFYLIVPMVGEEIARDEGREKFIFIDPGVRTFLTGYDSGQNVVEIGKNAVVRTEKLKHRRRKLQSKLAKLKTHKKRQNHRKALHRLDEKISRILSDMHKKSALCLCKSYETVFIPKLNFHQCTKLNRKSRSSMATMAHCSFNDRVVMKAEQLRGTSVIVVEEDYTSKTCSKCGNIKKDLGSNKIYSCVSCFSVFDRDFNAAKNIMLKYCCEHLMTSDASSVPLPLVERVRGSP

SEQ ID NO: 3888 - protein, 589 aa, Gigaspora margarita
MFQISWAPPPPPPPPPPPPPPPLRQRVMSTHEFQVQSRRQTLSGNKSFSSLSVPNTNSSQTLEVVSTSRDPACAPYWNKQVAEWSQKLWLPTGTDYVDSHMISSNTFLNSMVQNSWFSHKMAPPMTKLNSVKISLPSTLSLSVECKESEQQDIDKNEKNSSRKRKKPLKSTRRSKRQKKTDLTRSLKIRVYPNSSQKTLLKQWMGCARLVYNMVVANFNHGHLSTRQYWFRSLLKLKMLHEWNFMKGCPYEVLDHAITHAIQARDEVICRNNELNSDKHHLHFQRKKNNQQTITIRSKSCCKSGSLKFYVRSLHNNQITMSINRHKDNNPLFFPLHHEQRRKNHNWPNLEGKVKMDSKLMFNRKLGYWTFVWVYGKNVENCNDIQVAENLNIVAIDPGVRTGWSWYSPSKGCGWFGNLDINRVFRLSLFLDDLISRTTQAPPKKRNSMKRAQARLQCRIQNLVEECHKKVTLWFLTNFDVIIIPPFNGSAMSHRLNRKINSKTVRKMLTWSHSRFRKRLIFKAEELGKKVIIQNEAYTSKTCSCCGFIKHNLGGSKVFRCNECRVVIDRDFNGARGIFLRALLDGAVCI

SEQ ID NO: 3889 - protein, 544 aa, Gigaspora margarita
MIPQPPPLLKRKVSYTHVSQVTKKKKTFKDRNRSLNPDSRIISSSMMSGQVSTSKETGLRPYWNDQVKEWSQKLWLPTVTDSANSDLTSLNLCSYHTPQNSWFSSTNKVPTNMNYHKISLQSTPSLSVEHKKEKTKTIKARSKKKQKIETTVNRTLSIKTYPNHSQKKILKRWLGLMRYAYNTVVRWNKNRRFCNSSKNFEWIKPHTLNEKLKLYIDVKEGKDLNEKDKKLQRSCVWGERKFLRTVAWLELRLKGLHDKVPANIIDESIDDALTARKNIIQKNLKETKKSSLSFKSKKDLRQTMTIRMQNFSKKDWNHFYVTQLHSSLTLLSKRCKPNKLESGKRDLRPFHFEKKRKHNKWPLQKIDXVRTPFTWYSSTKGVGKIGEYDIGRIFRLCKHMDNLISKKDRLTSSISKRKKKKALRVDKAIFHEFDMIIIPPFEVSDMVNRKSRKITRKTVRKMLCWSHYKFRQRLISKAEEKGIHVVIQNEAYTSKTCSWCGNIQNIGGSEMYNCKNCGIKIDRDVNGARGIFLRALLDGAMILS

SEQ ID NO: 3890 - protein, 348 aa, Gigaspora margarita
MDSDQLRTGKDEEKLKTRKIRMYPTSEEREKLRKWMGTVRWTYNKVLEMLQDDKISNMNIIRKHYLNDECFANEELSWVKETPREVRNRGEYAFLKTVIVSERPPEINHTVNVTMNRLGHFYMCVSIPLDVSDNQDGVKGKVISLDPGVRTFMTGYDPNGRVVEWGNGDLNKIFRLSKRYDKLQKDKDLAIGRKNKRKRYKLKIKMYRIIVRIRNLINECHHQLARWLCENYEIILIPIFETSNMVLKNKRKIRSKTARMMLTWSHYRFRMFLHHKAREFVSCKVIKCTEEYTSKTCGNCGSINKKLGGSKIFRCDSCSLEIDRDMNGARNSLLKRITEGQVNPDFGT

SEQ ID NO: 3891 - protein, 393 aa, Gigaspora margarita
MDSDQLRTGNDEEKLKTRKIRMYPTSEEREKLRKWMGTVRWTYNKVLEMLQDDKISNMNIIRKHYLNDECFANEELSWVKETPREVRSYVIRQLMSTFKTSKKLHGNNFRMKYKTKKDRLQTISILARDWNRNRGEYAFLKTVIVSERPPEINHTVNVTMNRLGHFYMCVSIPLDVSDNQDGVKGKVISLDPGVRTFMTGYDPNGRVVEWGNGDLNKIFRLSKRYDKLQKDKDLAIGRKNKRKRYKLKIKMYRIIVRIRNLINECHHQLARWLCENYEIILIPIFETSNMVLKNKRKIRSKTARMMLTWSHYRFRMFLHHKAREFVSCKVIXCTEEYTSKTCGNCGSINKKLGGSKIFRCDSCSLEIDRDMNGARNXLLKRITEGQVNPDFGT

SEQ ID NO: 3892 - protein, 303 aa, Gigaspora margarita
MTIRAQNFSKKDWNHFYVTHLHNSSTLLSKRCKPNDFEGGKRDLCPFHFEKKRKHNKWPSQRIDCDCKLTYLHKTNEWIFYWVYEAQKQIRETQADVHVVSIDPGVRTXFTWYSSTKGAGKIGEYDIGRIFRLCKHMDDLISKKDRLASSISKRKKKKALRVDKAIFRMKRKIRRLQEEIHRKTIKFLTDEFDMIIIPSFEVSNMVNRKTRKITRKTVRKMLCWSHYKFRQRLISKAEEKGINVIIQNEAYTSKTCSWCGNIQNIGGSETYKCKNCNIKIDRDVNGARGIFLRALLDGAMILS

SEQ ID NO: 3893 - protein, 588 aa, Gigaspora margarita
MFQISWAPPPPPPPPPPPPLRQRVMSTHEFQVQSRRQTLSGNKSFSSLSVPNTNSSQTLEVVSTSRDPACAPYWNKQVAEWSQKLWLPTGTDYVDSHMISSNTFLNSMVQNSWFSHKMAPPMTKLNSVKISLPSTLSLSVECKESEQQDIDKNEKNSSRKRKKPLKSTRRSKRQKKTDLTRSLKIRVYPNSSQKTLLKQWMGCARLVYNMVVANFNHGHLSTRQYWFRSLLKLKMLHEWNFMKGCPYEVLDHAITHAIQARDEVICRNNELNSDKHHLHFQRKKNNQQTITIRSKSCCKSGSLKFYVRSLHNNQITMSINRHKDNNPLFFPLHHEQRRKNHNWPNLEGKVKMDSKLMFNRKLGYWTFVWVYGKNVENCNDIQVAENLNIVAIDPGVRTGWSWYSPSKGCGWFGNLDINRVFRLSLFLDDLISRYANYQAPPKKRNSMKRAQARLQCRIQNLVEECHKKVTLWFLTNFDVIIIPPFNGSAMSHRLNRKINSKTVRKMLTWSHSRFRKRLIFKAEELGKKVIIQNEAYTSKTCSCCGFIKHNLGGSKVFRCNECXVVIDRDFNGARGIFLRALLDGAVCI

SEQ ID NO: 3894 - protein, 623 aa, Gigaspora margarita
MFLTATQASSTLGVSSCTLRRWHRKGKIAAFHSPGGVRLYDVSNIVGSTTTTTTSSSSSSTPKSYVYARVSSSKQKADLERQQEFILTKCPQHELVSDIGSGINFKRPGLRTILEQASRRMVAEVVVAHRDRLCRFAYDLIEYILKLNGAKLVVLSQDGSSNDETELCQDILAINTVFVCRMQGKRAARYRQERKKQQQKTQETIEINSPLKTPKEDRSNSIPKDQSVPEFLTENIVETMDGLVYNMVVANFNHGHLSTRQYWFRSLLKLKMLHEWNFMKGCPYEVLDHAITHAIQARDEVICRNNELNSDKHHLHFQRKKDNQQTITIRSKSCCKSGSLKFYVRSLHNNQITMSINRHKDNNPLFFPLHHEQRRKNHNWPNLEGKVKMDSKLMFNRKLRYWTFVWVYGKNVENCNDIQVAENLNIVAIDPGVRTGWSWYSPSKGCGWFGNLDINRVFRLSLFLDDLISRTTQAPPKKRNSMKRAQARLQRRIQNLVEECHKKVTLWFLTNFDVIIIPPFNGSAMSHRLNRKINSKTVRKMLTWSHSRFRKRLIFKAEELGKKVIIQNEAYTSKTCSCCGFIKHNLGGSKVFRCNECGVVIDRDFNGARGIFLRALLDGAVCI

SEQ ID NO: 3895 - protein, 661 aa, Gigaspora margarita
MFLMYLSARKTTKKFGVSSDTLRLWLRQGKISAITSPSGTHLYDISSFLLELITQNDTSTTAVTEKKVSYTHVSQVTKKKKTFKDRNRSLNPDSRIISSSMMSGQVSTSKETGLRPYWNDQVKEWSQKLWLPTVTDSANSDLTSLNLCSYHTLQNSWFSSTNKVPTNMNYHKISLQSTPSLSVEHKKEKTKTIKARSKKKQKIETTVNRTLSIKTYPNHSQKKILKRWLGLMRYANNTVVRWNKNRRFCNSSKNFEWIKPHTLNEKLKLYIDVKEGKDLNKKDKKLQRSCVWGERKFLRTVAWLELRLKGLHDKVPANIIDESIDDALKARKNIIQKNLKETKKSSLSFKSKKDLRQTMTIRMQNFSKKDWNHFYVTQLHSSLTLLSKRCKPNKLESGKRDLRPFHFEKKRKHNKWPLQKIDCDCKLTYLRKTNEWIFHWVYEAQKQICETQADVHVIAIDPGVRTPFTWYSSTKGVGKIGEYDIGRIFRLCKHMDNLISKKDRLTSSISKRKKKKALRVDKAIFRMKRKINQLRDEVHRKTIKFLTDEFDMIIIPPFEVSDMVNRKSRKITRKTVRKMLCWSHYKFRQRLISKAEEKGIHVVIQNEAYTSKTCSWCGNIQNIGGSEMYNCKNCGIKIDRDVNGARGIFLRALLDGAMILS

SEQ ID NO: 3896 - protein, 1256 aa, Gigaspora margarita
MFLTATQASSTLGVSXCTLRRWHRKGKIAAFHSPGGVRLYDVSNIVGSTTTTTTTSSSSSSSTPKSYVYARVSSSKQKADLERQQEFLLTKCPQHELVSDIGSGINFKRPGLRTILEQASRRMVAEVVVAHRDRLCRFAYDLIEYILKLNGAKLVVLSQDGSSNDETELCQDILAINTVFVCRMQGKRAARYRQERKKQQQKTQETIEINSPLKTPKEDRSNSIPKDQSVPEFLTENIVETMDGLVYNMVVANFNHGHLSTRQYWFRSLLKLKMLHEWNFMKGCPYEVLDHAITHAIQARDEVICRNNELNSDKHHLHFQRKKNNQQTITIRSKSCCKSGSLKFYVRSLHNNQITMSINRHKDNNPLFFPLHHEQRRKNHNWPNLEGKVKMDSKLMFNRKLGYWTFVWVYGKNVENCNDIQVAENLNIVAIDPGVRTGWSWYSPSKGCGWFGNLDINRVFRLSLFLDDLISRTTQAPPKKRNSMKRAQARLRCRIQNLVEECHKKVTLWFLTNFDVIIIPPFNGSAMSHRLNRKINSKTVRKMLTWSHSRFRKRLIFKAEELGKKVIIQNEAYTSKTCSCCGFIKHNLGGSKVFRCLGESEKETGAVRANNPIPPYCKLFYFEVDIIDEGKNKIIGIGFCENGVDLNRMPGWDDGSWGYHGDDGQLFGSSVSDNPYGPLFSTGDTIGCCLNFKNNTVFYTKNGVNLGIAFRNLKGTLYPCVGLRSQGGSIEVNFGSRKFKFAATTSNDMDDELLKNKLIEAFNMCINTTKIYILEDLENSLKIKQDDALKFRGKFNFIMGSYEDAIIDLTKLLDIEPDNKFALRYRAEAYYQMEKYEEAIIDLTKLLDIEPNSKFALSYLGEAYHLTKEVIIDLAKLLDLENLLEIKQDSALKFRAKFNFIMRRYEDAIVDLTKLLDIEPNNKFALRYRAEAYYLMEKYKESFNDVNKLPNIDTSDEWASKLLAKIIEKYRGEAYHLTERYKDAIIDLTKLLGNDPNDDVDELLREEWIEAFNMCNNTTNTYTLEDLENSLKIDQDSALKFRVKFNFIMGSYEDAIIDLTKLLDIEPNNKFALRYRAEAYYLMEKYKESFNDVNKLPNIDTSDEWASKLLAKIIENPCVDETYELGYFYLHGINVEKDEYKAFAQFEKSANKGYTEGINYLGCCYEYGIGVEKDENKAFTYYQKSADMNNSNGMYQVGYCYYLGIGVEIDKHKAFTYYLKSAEAGNSMGIWKTAVCYYYGIGVEKNDDKFSEWDKK

SEQ ID NO: 3897 - protein, 626 aa, Gigaspora margarita
MFLTATQASSTLGVSSCTLRRWHRKGKIAAFHSPGGVRLYDVSNIVGSTTTTTTSSSSSSSSSTPKSYVYARVSSSKQKADLERQQEFLLTKCPQHELVSDIGSGINFKRPGLRTILEQASRRMVAEVVVAHRDRLCRFAYDLIEYILKLNGAKLVVLSQDGSSNDETELCQDILAINTVFVCRMQGKRAARYRQERKKQQQKTQETIEINSPLKTPKEDRSNSIPKDQSVPEFLTENIVETMDGLVYNMVVANFNHGHLSTRQYWFRSLLKLKMLHEWNFMKGCPYEVLDHAITHAIQARDEAICRNNELNSDKHHLHFQRKKNNQQTITIRSKSCCKSGSLKFYVRSLHNNQITMSINCHKDNNPLFFPLHHEQRRKNHNWLNLEGKVKMDSKLMFNRKLEYWTFVWVYGKNVENCNDIQVAENLNIVAIDPGVCTGWSWYSPSKGCGWFGNLDINRVFRLSLFLDDLISRTTQAPPKKRNSMKRAQARLQCRIQNLVEECHKKVTLWFLTNFDVIIIPPFNGSAMSHRLNRKINSKTVRKMLTWSHSRFRKRLIFKAEELGKKVIIQNEAYTSKTCSCCGFIKHNLGGSKVFRCNECRVVIDRDFNGARGIFLRALLDGAVCI

SEQ ID NO: 3898 - protein, 276 aa, Gigaspora margarita
MNIRAQNFSKKDWNHFYVTHLHSSLTLLSKRCKSNKLESGKRDLRPFHFEKKRKHNKWPLQKIDCDCKLTYLRKTNEWIFHWVYEAQKQIRETQADVHVVSIDPGVRTPFTWYSSTKDRLASSISKRKKKKALRVDKAIFRIKRKIKRLQDEVHRKTIKFLTDEFDMIIIPPFEVSNMVNRKSRKITRKTVRKMLCWSHYKFRQRLISKAEEKGIHVVIQNEAYTSKTCSWCGNIQNIGGSEMYNCKNCGIKIDRDVNGARGIFLRALLDGAMILS

SEQ ID NO: 3899 - protein, 606 aa, Gigaspora margarita
MIPQPPPLLKRKVSYTHVSQVTKKKKTFKDRNRSLNPDSRIISSSMMSGQVSTSKETGLRPYWNDQVKEWSQKLWLPTVTDSANSDLTSLNLCSYHTLQNSWFSSTDKVPTNMNYHKISLQSTPSLSVEHKKEKTKTIKARSKKKQKIETTVNRTLSIKTYPNHSQKKILKRWLGLMRYAYNTVVRWNKNRRFCNSSKNFEWIKPHTLNEKLKLYIDVKEGKDLNEKDKKLQRSCVWGERKFLRTVAWLELRLKGLHDKVPANIIDESIDDALKARKNIIQKNLKETKKSSLSFKSKKDLRQTMTIRMQNFSKKDWNHFYVTQLHSSLTLLSKRCKSNKLESGKRDLRPFHFEKKRKHNKWPLQKIDCDCKLTYLRKTNEWIFHWVYEAQKQIRETQADVHVIAIDPGVRTPFTWYSSTKGVGKIGEYDIGRIFRLCKHMDNLISKKDRLTSSISKRKKKKALRVDKAIFRMKRKINQLRDEVHRKTIKFLTDEFDMIIIPPFEVSNMVNRKSRKITRKTVRKMLCWSHYKFRQRLISKAEEKGIHVVIQNEAYTSKTCSWCGNIQNIGGSEMYNCKNCGIKIDRDVNGARGIFLRALLDGAMILS

SEQ ID NO: 3900 - protein, 612 aa, Gigaspora margarita
MFQISWAPPPPPPPPPPPXXXXXXXXXXXXXXXXXXXXXXXXSSSSSSSTPKSYVYARVSSSKQKADLERQQEFLLTKCPQHELVSDIGSGINFKRPGLRTILEQASRRMVAEVVVAHRDRLCRFAYDLIEYILKLNGAKLVVLSQDGSSNDETELCQDILAINTVFVCRMQGKRAARYRQERKKQQQKTQETIEINSPLKTPKEDRSNSIPKDQSVPEFLTENIVETMDGLVYNMVVANFNHGHLSTRQYWFRSLLKLKMLHEWNFMKGCPYEVLDHAITHAIQARDEVICRNNELNSDKHHLHFQRKKDNQQTITIRSKSCCKSGSLKFYVRSLHNNQITMSINRYKDNNPLFFPLHHEQRRKNHNWPNLEGKVKMDSKLMFNRKLGYWTFVWVYGKNVENCNDIQVAENLNIVAIDPGVRTGWSWYSLSKGCGWFGNLDINRVFRLSLFLDDLISRTTQAPPKKRNSMKRAQARLQRRIQNLVEECHKKVTLWFLTNFDVIIIPPFNGSAMSHRLNRKINSKTVRKMLTWSHSRFRKRLIFKAEELGKKVIIQNEAYTSKTCSCCGFIKHNLGGSKMFRCNECGVVIDRDFNGARGIFLRALLDGAVCI

SEQ ID NO: 3901 - protein, 694 aa, Gigaspora margarita
MFLTATQASSTLGVSSCTLRRWHRKGKIAAFHSPGGVRLYDVSNIVGSTTTTSSSSSSSSTPKSYVYARVSSSKQKADLERQQEFILTKCPQHELVSDIGSGINFKRPGLRTILEQASRRMVAEVVVAHRDRLCRFAYDLIEYILKLNGAKLVVLSQDGSSNDETELCQDILAINTVFVCRMQGKRAARYRQERKKQQQKTQETIEINSPLKTPKEDRSNSIPKDQSVPEFLTENIVETMDGLVYNMVVANFNHGHLSTRQYWFRSLLKLKMLHEWNFMKGCPYEVLDHAITHAIQARDEVICRNNELNSDKHHLHFQRKKDNQQTITIRSKSCCKSGSLKFYVRSLHNNQITMSINRHKDNNPLFFPLHHEQRRKNHNWPNLEGKVKMDSKLMFNRKLRYWTFVWVYGKNVENCNDIQVAENLNIVAIDPGVRTGWSWYSPSKGCGWFGNLDINRVFRLSLFLDDLISRTTQAPPKKRNSMKRAQARLQRRIQNLVEECHKKVTLWFLTNFDVIIIPPFNGSAMSHRLNRKINSKTVRKMLTWSHSRFRKRLIFKAEELGKKVIIQNEAYTSKTCSCCGFIKHNLGGSKVFRCNECGVVIDRDFNGARGIFLRALLDGAVFVMSTNIFSYKAGETRVFNTSRDNIRLKVEGLNEDVAGVILVDENESPINVTKKVEFINKATKNRISVKGQKS

SEQ ID NO: 3902 - protein, 628 aa, Gigaspora margarita
MFLTATQAXSTLGVSSCTLRRWHRKGKIAAFHSPGGVRLYDVSNIVGSTTTTTTTTTSSSSSSSSTPKSYVYARVSSSKQKADLERQQEFLLTKSPQHELVSDIGSGINFKRPGLRTILEQASRRMVAEVVVAHRDRLCRFAYDLIEYILKLNGAKLVVLSQDGSSNDETELCQDILAINTVFVCRMQGKRAARYRQERKKQQQKTQETIEINSPLKTPKEDRSNSIPKDQSVPEFLTENIVETMDGLVYNMVVANFNHGHLSTRQYWFRSLLKLKMLHEWNFMKGCPYEVLDHAITHAIQARDEVICRNNELNSDKHHLHFQRKKNNQQTITIRSKSCCKSGSLKFYVRSLHNNQITMSINRHKDNNPLFFPLHHEQRRKNHNWPNLEGKVKMDSKLMFNRKLGYWTFVWVYGKNVENCNDIQVAENLNIVAIDPGVRTGWSWYSPSKGCGWFGNLDINRVFRLSLFLDDLISRTTQAPPKKRNSMKRAQARLQCRIQNLVEECHKKVTLWFLTNFDVIIIPPFNGSAMSHRLNRKINSKTVRKMLTWSHSRFRKRLIFKAEELGKKVIIQNEAYTSKTCSCCGFIKHNLGGSKVFRCNECRVVIDRDFNGARGIFLRALLDGAVCI

SEQ ID NO: 3903 - protein, 598 aa, Gigaspora margarita
MIPQPPPLLKRKVSYTHVSQVTKKKKTFKDRNRSLNPDSRIISSSMMSGQVSTSKETGLRPYWNDQVKEWSQKLWLPTVTDSANSDLTSLNLCSYHTLQNSWFSSTNKVPTNMNYHKISLQSTPSLSVEHKKEKTKTIKARSKKKQKIETTMNRTLSIKTYPNHSQKKILKRWLGLMRYAYNTVVRWNKNRRFCNSSKNFEWIKPHTLNEKLKLYIDVKDKKLQRSCVWGERKFLRTVAWLELRLKGLHDKVPANIIDESIDDALKARKNIIQKNLKETKKSSLSFKSKKDLRQTMTIRMQNFSKKDWNHFYVTQLHSSLTLLSKRCKSNKLESGKRDLRPFHFEKKRKHNKWPLQKIDCDCKLTYLRKTNEWIFHWVYEAQKQIRETQADVHVIAIDPGVRTPFTWYSSTKGVGKIGEYDIGRIFRLCKHMDNLISKKDRLTSSISKRKKKKALRVDKAIFRMKRKINQLRDEVHRKTIKFLTDEFDMIIIPPFEVSDMVNRKSRKITRKTVRKMLCWSHYKFRQRLISKAEEKGIHVVIQNEAYTSKTCSWCGNIQNIGGSEMYNCKNCGIKIDRDVNGARGIFLRALLDGAMILS

SEQ ID NO: 3904 - protein, 623 aa, Gigaspora margarita
MFLTATQASSTLGVSSCTLRRWHRKGKIAAFHSPGGVRLYDVSNIVGSTTTTTSSSSSSSTPKSYVYARVSSSKQKADLERQQEFILTKCPQHELVSDIGSGINFKRPGLRTILEQASRRMVAEVVVAHRDRLCRFAYDLIEYILKLNGAKLVVLSQDGSSNDETELCQDILAINTVFVCRMQGKRAARYRQERKKQQQKTQETIEINSPLKTPKEDRSNSIPKDQSVPEFLTENIVETMDGLVYNMVVANFNHGHLSTRQYWFRSLLKLKMLHEWNFMKGCPYEVLDHAITHAIQARDEVICRNNELNSDKHHLHFQRKKDNQQTITIRSKSCCKSGSLKFYVRSLHNNQITMSINRHKDNNPLFFPLHHEQRRKNHNWPNLEGKVKMDSKLMFNRKLRYWTFVWVYGKNVENCNDIQVAENLNIVAIDPGVRTGWSWYSPSKGCGWFGNLDINRVFRLSLFLDDLISRTTQAPPKKRNSMKRAQARLQRRIQNLVEECHKKVTLWFLTNFDVIIIPPFNGSAMSHRLNRKINSKTVRKMLTWSHSRFRKRLIFKAEELGKKVIIQNEAYTSKTCSCCGFIKHNLGGSKVFRCNECGVVIDRDFNGARGIFLRALLDGAVCI

SEQ ID NO: 3905 - protein, 625 aa, Gigaspora margarita
MFLTATQASSTLGVSSCTLRSWHRKGKIAAFHSPGGVRLYDVSNIVGSTTTTTSSSSSSSSSTPKSYVYARVSSSKQKADLERQQEFLLTKCPQHELVSDIGSGINFKRPGLRTILEQASRRMVAEVVVAHRDRLCRFAYDLIEYILKLNGAKLVVLSQDGSSNDETELCQDILAINTVFVCRMQGKRAARYRQERKKQQQKTQETIEINSPLKTPKEDRSNSIPKDQSVPEFLTENIVETMDGLVYNMVVANFNHGHLSTRQYWFRSLLKLKMLHEWNFMKGCPYEVLDHAITHAIQARDEVICRNNELNSDKHHLHFQRKKNNQQTITIRSKSCCKSGSLKFYVRSLHNNQITMSINRHKDNNPLFFPLHHEQRRKNHNWPNLEGKVKMDSKLMFNRKLGYWTFVWVYGKNVENCNDIQVAENLNIVAIDPGVRTGWSWYSPSKGCGWFGNLDINRVFRLSLFLDDLISRTTQAPPKKRNSMKRAQARLQCRIQNLVEECHKKVTLWFLTNFDVIIIPPFNGSAMSHRLNRKINSKTVRKMLTWSHSRFRKRLIFKAEELGKKVIIQNEAYTSKTCSCCGFIKHNLGGSKVFRCNECRVVIDRDFNGARGIFLRALLDGAVCI

SEQ ID NO: 3906 - protein, 588 aa, Gigaspora margarita
MFQISWAPPPPPPPPPPPPPPLRQRVMSTHEFQVQSRRQTLSGNKSFSSLSVPNTNSSQTLEVVSTSRDPACAPYWNKQVAEWSQKLWLPTGTDYVDSHMISSNTFLNSMVQNSWFSHKMAPPMTKLNSVKISLPSTLSLSVECKESEQQDIDKNEKNSSRKRKKPLKSTRRSKRQKKTDLTRSLKIRVYPNSSQKTLLKQWMGCARLVYNMVVANFNHGHLSTRQYWFRSLLKLKMLHEWNFMKGCPYEVLDHAITHAIQARDEVICRNNELNSDKHHLHFQRKKNNQQTITIRSKSCCKSGSLKFYVRSLHNNQITMSINRHKDNNPLFFPLHHEQRRKNHNWPNLEGKVKMDSKLMFNRKLGYWTFVWVYGKNVENCNDIQVAENLNIVAIDPGVRTGWSWYSPSKGCGWFGNLDINRVFRLSLFLDDLISRTTQAPPKKRNSMKRAQARLQCRIQNLVEECHKKVTLWFLTNFDVIIIPPFNGSAMSHRLNRKINSKTVRKMLTWSHSRFQKRLIFKAEELGKKVIIQNEAYTSKTCSCCGFIKHNLGRSKVFRCNECRVVIDRDFNGARGIFLRALLDGAVCI

SEQ ID NO: 3907 - protein, 640 aa, Gigaspora margarita
MFLTATQASSTLGVSXCTLRRWHRKGKIAAFHSPGGVRLYDVSNIVGSTTTTTTTSSSSSSTPKSYVYARVSSSKQKADLERQQEFLLTKCPQHELVSDIGSGINFKRPGLRTILEQASRRMVAEVVVAHRDRLCRFAYDLIEYILKLNGAKLVVLSQDGSSNDETELCQDILAINTVFVCRMQGKRAARYRQERKKQQQKTQETIEINSPLKTPKEDRSNSIPKDQSVPEFLTENIVETMDGLVYNMVVANFNHGHLSTRQYWFRSLLKLKMLHEWNFMKGCPYEVLDHAITHAIQARDEVICRNNELNSDKHHLHFQRKKNNQQTITIRSKSCCKSGSLKFYVRSLHNNQITMSINRHKDNNPLFFPLHHEQRRKNHNWPNLEGKVKMDSKLMFNRKLGYWTFVWVYGKNVENCNDIQVAENLNIVAIDPGVRTGWSWYSPSKGCGWFGNLDINRVFRLSLFLDDLISRTTQAPPKKRNSMKRAQARLQCRIQNLVEECHKKVTLWFLTNFDVIIIPPFNGSAMSHRLNRKINSKTVRKMLTWSHSRFRKRLIFKAEELGKKVIIQNEAYTSKTCSCCGFIKHNLGGSKVFRCNECRVVIDRDFNGARGIFLRALLDGAESETDKSEALEDLLSDTDG

SEQ ID NO: 3908 - protein, 626 aa, Gigaspora margarita
MFLTATQASSTLGVSLCTLRRWHRKGKIAAFHSPGGVRLYDVSNIVGSTTTTTTSSSSSSSSSTPKSYVYARVSSSKQKADLERQQEFLLTKCPQHELVSDIGSGINFKRPGLRTILEQASRRMVAEVVVAHRDRLCRFAYDLIEYILKLNGAKLVVLSQDGSSNDETELCQDILAINTVFVCRMQGKRAARYRQERKKQQQKTQETIEINSPLKTPKEDRSNSIPKDQSVPEFLTENIVETMDGLVYNMVVANFNHGHLSTRQYWFRSLLKLKMLHEWNFMKGCPYEVLDHAITHAIQARDEVICRNNELNSDKHHLHFQRKKNNQQTITIRSKSCCKSGSLKFYVRSLHNNQITMSINRHKDNNPLFFPLHHEQRRKNHNWPNLEGKVKMDSKLMFNRKLGYWTFVWVYGKNVENCNDIQVAENLNIVAIDPGVRTGWSWYSPSKGCGWFGNLDINRVFRLSLFLDDLISRTTQAPPKKRNSMKRAQARLQCRIRNLVEECHKKVTLWFLTNFDVIIIPPFNGSAMSHRLNRKINSKTVRKMLTWSHSRFRKRLIFKAEELGKKVIIQNEAYTSKTCSCCGFIKHNLGGSKVFRCNECRVVIDRDFNGARGIFLRALLDGAVCI

SEQ ID NO: 3909 - protein, 626 aa, Gigaspora margarita
MFLTATQASSTLGVSSCTLRRWHRKGKIAAFHSPGGVRLYDVSNIVGSTTTTTSSSSSSSSSSTPKSYVYARVSSSKQKADLERQQEFLLTKCPQHELVSDIGSGINFKRPGLRTILEQASRRMVAEVVVAHRDRLCRFAYDLIEYILKLNGAKLVVLSQDGSSNDETELCQDILAINTVFVCRMQGKRAARYRQERKKQQQKTQETIEINSPLKMPKEDRSNSIPKDQSVPEFLTENIVETMDGLVYNMVVANFNHGHLSTRQYWFRSLLKLKMLHEWNFMKGCPYEVLDHAITHAIQARDEVICRNNELNSDKHHLHFQRKKNNQQTITIRSKSCCKSGSLKFYVRSLHNNQITMSINRHKDNNPLFFPLHHEQRRKNHNWPNLEGKVKMDSKLMFNRKLGYWTFVWVYGKNVENCNDIQVAENLNIVAIDPGVRTGWSWYSPSKGCGWFGNLDINRVFRLSLFLDDLISRTTQAPPKKRNSMKRAQARLRCRIQNLVEECHKKVTLWFLTNFDVIIIPPFNGSAMSHHLNRKINSKTVRKMLTWSHSRFRKRLIFKAEELGKKVIIQNEAYTSKTCSCCGFIKHNLGGSKVFRCNECRVVIDRDFNGARGIFLRALLDGAVCI

SEQ ID NO: 3910 - protein, 624 aa, Gigaspora margarita
MFLTATQASSTLGVSSCTLRRWHRKGKIAAFHSPGGVRLYDVSNIVGSTTTTTTTTSSSSSTPKSYVYARVSSSKQKADLERQQEFLLTKCPQHELVSDIGSGINFKRPGLRTILEQASRRMVAEVVVAHRDRLCRFAYDLIEYILKLNGAKLVVLSQDGSSNDETELCQDILAINTVFVCRMQGKRAARYRQERKKQQQKTQETIEINSPLKTPKEDRSNSIPKDQSVPEFLTENIVETMDGLVYNMVVANFNHGHLSTRQYWFRSLLKLKMLHEWNFMKGCPYEVLDHAITHAIQARDEVICRNNELNSDKHHLHFQRKKNNQQTITIRSKSCCKSGSLKFYVRSLHNNQITMSINRHKDNNPLFFPLHHEQRRKNHNWPNLEGKVKMDSKLMFNRKLGYWTFVWVYGKNVENCNDIQVAENLNIVAIDPGVRTGWSWYSPSKGCGWFGNLDINRVFRLSLFLDDLISRTTQAPPKKRNSMKRAQARLQCRIQNLVEECHKKVTLWFLTNFDVIIIPPFNGSAMSHRLNRKINSKTVRKMLTWSHSRFRKRLIFKAEELGKKVIIQNEAYTSKTCSCCGFIKHNLGGSKVFRCNECRVVIDRDFNGARGIFLRALLDGAVCI

SEQ ID NO: 3911 - protein, 538 aa, Gigaspora margarita
MSTTKYRGAQEIRKTYEVSSETLRRWNNQGKISSIRTSGGKRLYSVTDLEKIFQEKVNEKKKICYARVSSDKQKEDLDRQCEHLMEKYPDHELIKDIGSGLNWKRKGFTSILERSFQGDIDEVVVARKDRLCRFAYELVEWIFDTMDSDQLRTGNEEEKLKTRKIRMYPTSEEREKLRKWMGTVRWTYNKVLEMLQDDKISNMNIIRKHYLNDECFANEELSWVKETPREVRSYVIRQLMSTFKTSKKLHGNNFRMKYKTKKDRSQTISILARDWNRNRGEYAFLKTVIVSERPPEINHTVNVTMNRLGHFYMCVSIPLDVSDNQDGVKGKVISLDPGVRTFMTGYDPNGRVVEWGNGDLNKIFRLSKRYDKLQKDKDLAIGRKNKRKRYKLKIKMYRIIVRIRNLINECHHQLARWLCENYEIILIPIFETSNMVLKNKRKIRSKTARMMLTWSHYRFRMFLHHKAREFVSCKVIECTEEYTSKTCGNCGSINKKLGGSKIFRCDSCSLEIDRDMNGARNILLKRITEGQVNPDFGT

SEQ ID NO: 3912 - protein, 626 aa, Gigaspora margarita
MFLTATQASSTLGVSSCTLRRWHRKGKIAAFHSPGGVRLYDVSNIVGSTTTTTTSSSSSSSSSTPKSYVYARVSSSKQKADLERQQEFLLTKCPQHELVSDIGSGINFKRPGLRTILEQASRRMVAEVVVAHRDRLCRFAYDLIEYILKLNGAKLVVLSQDGSSNDETELCQDILAINTVFVCRMQGKRAARYRQERKKQQQKTQETIEINSPLKTPKEDRSNSIPKDQSVPEFLTENIVETMDGLVYNMVVANFNHGHLSTRQYWFRSLLKLKMLHEWNFMKGCPYEVLDHAITHAIQARDEVICRNNELNSDKHHLHFQRKKNNQQTITIRSKSCCKSGSLKFYVRSLHNNQITMSINRHKDNNPLFFPLHHEQRRKNHSWPNLEGKVKMDSKLMFNRKLGYWTFVWVYGKNVENCNDIQVAENLNIVAIDPGVRTGWSWYSPSKGCGWFGNLDINRVFRLSLFLDDLISRTTQAPPKKRNSMKRAQARLQCRIQNLVEECHKKVTLWFLTNFDVIIISPFNGSAMSHRLNRKINSKTVRKMLTWSHSRFRKRLIFKAEELGKKVIIQNEAYTSKTCSCCGFIKHNLGGSKVFRCNECRVVIDRDFNGARGIFLRALLDGAVCI

SEQ ID NO: 3913 - protein, 609 aa, Gigaspora margarita
MFLTATQASSTLGVSSCTLXXXXRKXKIAAFHSPGGVRLYDVSNIVGSTTTTTTTTSSSSSSSSSTPKSYVYARVSSSKQKADLERQQEFLLTKCPQHELVSDIGSGINFKRPGLRTILEQASRRMVAEVVVAHRDRLCRFAYDLIEYILKLNGAKLVVLSQDGSSNDETELCQDILAINTVFVCRMQGKRAARYRQERKKQQQKTQETIEINSPLKTPKEDRSNSIPKDQSVPEFLTENIVETMDGLVYNMVVANFNHGHLSTRQYWFRSLLKLKMLHEWNFMKGCPYEVLDHAITHAIQARDEVICRNNELNSDKHHLHFQRKKNNQQTITIRSKSCCKSGSLKFYVRSLHNNQITMSINRHKDNNPLFFPLHHEQRRKNHNWPNLEGKVKMDSKLMFNRKLGYWTFVWVYGKNVENCNDIQVAENLNIVAIDPGVRTGWSWYSPSKGCGWFGNLDINRVFRLSLFLDDLISRTTQAPPKKRNSMKRAQARLQCRIQNLVEECHKKVTLWFLTNFDVIIIPPFNGSAMSHRLNRKINSKTAEELGKKVIIQNEAYTSKTCSCCGFIKHNLGGSKVFRCNECRVVIDRDFNGARGIFLRALLDGAVCI

SEQ ID NO: 3914 - protein, 598 aa, Gigaspora margarita
MIPQPPPLLKRKVSYTHVSQVTKKKKTFKDRNRSLNPDSRIISSSMMSGQVSTSKETGLRPYWNDQVKEWSQKLWLPTVTDSANSDLTSLNLCSYHTLQNSWFSSTNKVPTNMNYHKISLQSTPSLSVEHKKEKTKTIKARSKKKQKIETTVNRTLSIKTYPNHSQKKILKRWLGLMRYAYNTVVRWNKNRRFCNSSKNFEWIKPHTLNEKLKLYIDVKDKKLQRSCVWGERKFLRTVAWLELRLKGLHDKVPANIIDESIDDALKARKNIIQKNLKETKKSSLSFKSKKDLRQTMTIRMQNFSKKDWNHFYVTQLHSSLTLLSKRCKSNKLESGKRDLRPFHFEKKRKHNKWPLQKIDCDCKLTYLRKTNEWIFHWVYEAQKQIRETQADVHVIAIDPGVRTPFTWYSSTKGVGKIGEYDIGRIFRLCKHMDNLISKKDRLTSSISKRKKKKALRVDKAIFRMKRKINQLRDEVHRKTIKFLTDEFDMIIIPPFEVSDMVNRKSRKITRKXVRKMLCWSHYKFRQRLISKAEEKGIHVVIQNEAYXSKTCSWCGNIQNIGGSEMYNCKNCGIKIDRDVNGARGIFLRALLDGAMILS

SEQ ID NO: 3915 - protein, 625 aa, Gigaspora margarita
MFLTATQASSTLGVSSCTLRRWHRKGKIAAFHSPGGVRLYDVSNIVGSTTTTTTSSSSSSSSTPKSYVYARVSSSKQKTDLERQQEFLLTKSPQHELVSDIGSGINFKRPGLRTILEQASRRMVAEVVVAHRDRLCRFAYDLIEYILKLNGAKLVVLSQDGSSNDETELCQDILAINTVFVCRMQGKRAARYRQERKKQQQKTQETIEINSPLKTPKEDRSNSIPKDQSVPEFLTENIVETMDGLVYNMVVANFNHGHLSTRQYWFRSLLKLKMLHEWNFMKGCPYEVLDHAITHAIQARDEVICRNNELNSDKHHLHFQRKKNNQQTITIRSKSCCKSGSLKFYVRSLHNNQITMSINRHKDNNPLFFPLHHEQRRKNHNWPNLEGKVKMDSKLMFNRKLGYWTFVWVYGKNVENCNDIQVAENLNIVAIDPGVRTGWSWYSPSKGCGWFGNLDINRVFRLSLFLDDLISRTTQAPPKKRNSMKRAQARLQCRIQNLVEECHKKVTLWFLTNFDVIIIPPFNGSAMSHRLNRKINSKTVRKMLTWSHSRFRKRLIFKAEELGKKVIIQNEAYTSKTCSCCGFIKHNLGGSKVFRCNECRVVIDRDFNGARGIFLRALLDGAVCI

SEQ ID NO: 3916 - protein, 623 aa, Gigaspora margarita
MFLTATQASXTLGVSSCTLRRWHRKGKIAAFHSPGGVRLYDVSNIVGSTTTTSSSSSSSSTPKSYVYARVSSSKQKADLERQQEFLLTKCPQHELVSDIGSGINFKRPGLRTILEQASRRMVAEVVVAHRDRLCRFAYDLIEYILKLNGAKLVVLSQDGSSNDETELCQDILAINTVFVCRMQGKRAARYRQERKKQQQKTQETIEINSPLKTPKEDRSNSIPKDQSVPEFLTENIVETMDGLVYNMVVANFNHGHLSTRQYWFRSLLKLKMLHEWNFMKGCPYEVLDHAITHAIQARDEVICRNNELNSDKHHLHFQRKKDNQQTITIRSKSCCKSGSLKFYVRSLHNNQITMSINRHKDNNPLFFPLHHEQRRKNHNWPNLEGKVKMDSKLMLNRKLGYWTFVWVYGKNVENCNDIQVAENLNIVAIDPGVRTGWSWYSPSKGCGWFGNLDINRVFRLSLFLDDLISRTTQAPPKKRNSMKRAQARLQRRIQNLVEECHKKVTLWFLTNFDVIIIPPFNGSAMSHRLNRKINSKTVRKMLTWSHSRFRKRLIFKAEELGKKVIIQNEAYTSKTCSCCGFIKHNLGGSKVFRCNECGVVIDRDFNGARGIFLRALLDGAVCI

SEQ ID NO: 3917 - protein, 204 aa, Gigaspora margarita
MDISLGVRTPFTWYSSTKGVGKIGEYDIGRIFRLCKHMDNLISXKDRLASSISKRKKKKALRVDKAIFRIKRKIKXLQDEVHRKTIKFLTDEFDMIIIPPFXVSXMVNRKSRKITRKTVRKMLCWSHYKFRQRLISKAEEKGIHVVIQNEAYTSKTCSWCGNIQNIGGSEMYNCKNCGIKIDRDVNGARGIFLRALLDGAMILS

SEQ ID NO: 3918 - protein, 624 aa, Gigaspora margarita
MFLTATQASSTLGVSSCTLRRWHRKGKIAAFHSPGGVRLYDVSNIVGSTTTTTTSSSSSSSTPKSYVYARVSSSKQKADLERQQEFLLTKCPQHELVSDIGSGINFKRPGLRTILEQASRRMVAEVVVAHRDRLCRFAYDLIEYILKLNGAKLVVLSQDGSSNDETELCQDILAINTVFVCRMQEKRAARYRQERKKQQQKTQETIEINSPLKTPKEDRSNSIPKDQSVPEFLTENIVETMDGLVYNMVVANFNHGHLSTRQYWFRSLLKLKMLHEWNFMKGCPYEVLDHAITHAIQARDEVICRNNELNSDKHHLHFQRKKNNQQTITIRSKSCCKSVSLKFYVRSLHNNQITMSINRHKDNNPLFFPLHHEQRRKNHNWPNLEGKVKMDSKLMFNRKLGYWTFVWVYGKNVENCNDIQVAENLNIVAIDPGVRTGWSWYSPSKGCGWFGNLDIIRVFRLSLFLDDLISRTTQAPPKKRNSMKRAQARLQCRIQNLVEECHKKVTLWFLTNFDVIIIPPFNGSAMSHRLNRKINSKTVRKMLTWSHSRFRKRLIFKAEELGKKVIIQNEAYTSKTCSCCGFIKHNLGGSKVFRCNECRVVIDRDFNGARGIFLRALLDGAVCI

SEQ ID NO: 3919 - protein, 342 aa, Gigaspora margarita
MFLTATQASSTLGVSSCTLRRWHRKGKIAAFHSPGGVRLYDVSNIVGSTTTTTSSSSSSSTPKSYVYARVSSSKQKADLERQQEFILTKCPQHELVSDIGSGINFKRPGLRTILEQASRRMVAEVVVAHRDRLCRFAYDLIEYILKLNGAKLVVLSQDGSSNDETELCQDILAINTVFVCRMQGKRAARTTQAPPKKRNSMKRAQARLQRRIQNLVEECHKKVTLWFLTNFDVIIIPPFNGSAMSHRLNRKINSKTVRKMLTWSHSRFRKRLIFKAEELGKKVIIQNEAYTSKTCSCCGFIKHNLGGSKVFRCNECGVVIDRDFNGARGIFLRALLDGAVCI

SEQ ID NO: 3920 - protein, 547 aa, Gigaspora margarita
MSTTKYRGAQEIRKTYEVSSETLRRWNNQGKISSIRTSGGKRLYSVTDLEKIFQEKVNEKKKICYARVSSDKQKEDLDRQCEHLMEKYPDHELIKDIGSGLNWKRKGFTSILERSFQGDIDEVVVARKDRLCRFAYELVEWIFGKNDTKILQDTMDSDQLRTGNDEEKLKTRKIRMYPTSEEREKLRKWMGTVRWTYNKVLEMLQDDKISNMNIIRKHYLNDECFANEELSWVKETPREVRSYVIRQLMSTFKTSKKLHGNNFRMKYKTKKDRSQTISILARDWNRNRGEYAFLKTVIVSERPPEINHTVNVTMNRLGHFYMCVSIPLDVSDNQDGVKGKVISLDPGVRTFMTGYDPNGRVVEWGNGDLNKIFRISKRYDKLQKDKDLAIGRKNKRKRYKLKIKMYRIIVRIRNLINECHHQLARWLCENYEIILIPIFETSNMVLKNKRKIRSKTARMMLTWSHYRFRMFLHHKAREFVSCKVIECTEEYTSKTCGNCGSINKKLGGSKIFRCDSCSLEIDRDMNGARNILLKRITEGQVNPDFGT

SEQ ID NO: 3921 - protein, 576 aa, Gigaspora margarita
MFQASSTLGVSSCTLRRWHRKGKIAAFHSPGGVRLYDVSNIVGSTTTTTTTTSSSSSSSTPKSYVYARVSSSKQKADLERQQEFLLTKCPQHELVSDIGSGINFKRPGLRTILEQASRRMVAEVVIAHRDRLCRFAYDLIEYILKLNGAKLVVLSQDGSSNDETELCQDILAINTVFVCRMQGKRAARYRQERKKQQQKTQETIEINSPLKTPKEDRSNSIPKDQSVPEFLTENIVETMDGLVYNMVVANFNHGHLSTRQYWFRSLLKLKMLHEWNFMKGCPYEVLDHAITHAIQARDEVICRNNELNSDKHHLHFQRKKNNQQTITIRSKSCCKSGSLKFYVRSLHNNQITMSINRHKDNNPLFFPLHHEQRRKNHNWPNLEGKVKMDSKLMFNRKLGYWTFVWVYGKNVENCNDIQVAENLNIVAIDPGVRTGWSWYSPSKGCGWFGNLDINRVFRLSLFLDDLISRTTQAPPKKRNSMKRAQARLQCRIQNLVEECHKKVTLWFLTNFDVIIIPPFNGSAMSHRLNRKINSKTICKMLTWSHSQFRKRLIFKAEELGKKVIIQNEAYTSKTCX

SEQ ID NO: 3922 - protein, 626 aa, Gigaspora margarita
MFLTATQASSTLGVSSCTLRSWHRKGKIAAFHSPGGVRLYDVSNIVGSTTTTTTTSSSSSSSSTPKSYVYARVSSSKQKADLERQQEFLLTKCPQHELVSDIGSGINFKRPGLRTILEQASRRMVAEVVVAHRDRLCRFAYDLIEYILKLNGAKLVVLSQDGSSNDETELCQDILAINTVFVCRMQGKRAARYRQERKKQHQKTQETIEINSPLKTPKEDRSNSIPKDQSVPEFLTENIVETMDGLVYNMVVANFNHGHLSTRQYWFRSLLKLKMLHEWNFMKGCPYEVLDHAITHAIQARDEVICRNNELNSDKHHLHFQRKKNNQQTITIRSKSCCKSGSLKFYVRSLHNNQITMSINRHKDNNPLFFPLHHEQRRKNHNWPNLEGKVKMGSKLMFNRKLGYWTFVWVYGKNVENCNDIQVAENLNIVAIDPGVRTGWSWYSPSKGCGWFGNLDINRVFCLSLFLDDLISRTTQAPPKKRNSMKRAQARLQCRIQNLVEECHKKVTLWFLTNFDVIIIPPFNGSAMSHRLNRKINSKTVRKMLTWSHSQFRKRLIFKAEELGKKVIIQNEAYTSKTCSCCGFIKHNLGGSKVFRCNECRVVIDRDFNGARGIFLRALLDGAVCI

SEQ ID NO: 3923 - protein, 591 aa, Gigaspora margarita
MFQISWAPPPPPPPPPLPPPPPPPLRQRVMSTHKFQVQSRRQTLSGNKSFSSLXXPNTNSSQTLEVVSTSRDPACAPYWNKQVAEWSQKLWLPTGTDYVDSHMISSDTFLNSMVQNSWFSHKMAPPMTKLNSVKISLPSTLSLSVECKESEQQDIDKNEKNGSRKRKKPLKSTRRSKRQKKTDLTRSLKIRVYPNSSQKTLLKQWMGCARLVYNMVVANFNHGHLSTRQYWFRSLLKLKMLHEWNFMKGCPYEVLDHAITHAIQARDEVICRNNELNSDKHHLHFQGKKNNQQTITIRSKSCCKSGSLKFYVRSLHNNQITMSINRHKDNNPLFFPLHHEQRRKNHNWPNLEGKVKMDSKLMFNRKLGYWTFVWVYGKNVENCNDIQVAENLNIVAIDPGVRTGWSWYSPSKGCGWFGNLDINRVFRLSLFLDDLISRTTQAPPKKRNSMKRAQARLQCCIQNLVEECHKKVTLWFLTNFDVIIIPPFNGSAMSHRLNRKINSKTVRKMLTWSHSRFRKRLIFKAEELGKKVIIQNEAYTSKTCSCCGFIKHNLGGSKVFRCNECRVVIDRDFNGARGIFLRALLDGAVCI

SEQ ID NO: 3924 - protein, 281 aa, Gigaspora margarita
MSINRHKDNNPLFFPLHHEQRRKNHNWPNLEGKVKMDSKLMFNRKLGYWTFVWVYGTLRQHQSMHGGKNVENCNDIQVAENLNIVAIDPGVRTGWSWYSPSKGCGWFGNLDINRVFRLSLFLDDLISRTTQAPPKKRNSMKRAQARLQCRIQNLVEECHKKVTLWFLTNFDVIIIPPFNGSAMSHRLNRKINSKTVRKMLTWSHSRFRKRLIFKAEELGKKVIIQNEAYTSKTCSCCGFIKHNLGGSKVFRCNECRVVIDRDFNGARGIFLRALLDGAVCI

SEQ ID NO: 3925 - protein, 345 aa, Gigaspora margarita
MFLTATQASSTLGVSSCTLRRWHRKGKIAAFHSPGGVRLYDVSNIVGSTTTTTTSSSSSSSSSTPKSYVYARVSSSKQKADLERQQEFLLTKCPQHELVSDIGSGINFKRPGLRTILEQASRRMVAEVVVAHRDRLCRFAYDLIEYILKLNGAKLVVLSQDGSSNDETELCQDILAINTVFVCRMQGKRAARTTQAPPKKRNSMKRAQARLQCRIQNLVEESHKKVTLWFLTNFDVIIIPPFNGSAMSHRLNRKINSKTVRKMLTWSHSRFRKRLIFKAEELGKKVIIQNEAYTSKTCSCCGFIKHNLGGSKVFRCNECRVVIDRDFNGARGIFLRALLDGAVCI

SEQ ID NO: 3926 - protein, 450 aa, Gigaspora margarita
MLVNRTLSIKTYPNHLQKRILKRWLGLTRYAYNTVVRWDKSRHRCDSSKHFEWIKPQTLSERLKLYIDVKEGKDLNEKDKKLQRSCVWGERKFLHTVVWLELHLKGLHDKVPTNVIDESIDEALIARKNIIQKNSKETKKSSLSFRSKKGLWQTMTIRVQNFSKKDWNHFYTTYLHNSSTLLSKRYKSNKLESGKRDLRPFHFEKKRKHNKWPLQKIDCDCKLTYIRKTNEWIFYWVYEAQKQIRETQADVHVVSIDPGVRTPFTWYSSTKGVGKIGEYDIGRIFRLYKHMDDLISQKDKLASSISKRKKKKALRVDKAIFRMKRKIKRLQDEIHRKTIKFLTDEFDMIIIPPFEVSGMINRKARKITRKTVRKMLCWSHYKFRQRLISKAEEKGIHVLIQNEAYTSKTCSWCGNIQNIGGSETYKCKNCDIKIDRDVNGARGIFLRVLP

SEQ ID NO: 3927 - protein, 626 aa, Gigaspora margarita
MFLTATQASSTLGVSSCTLRRWHRKGKIAAFHSPGGVRLYDVSNIVGSTTTTTNTSSSSSSSSTPKSYVYARVSSSKQKADIERQQEFLLTKCPQHELVSDIGSGINFKRPGLRTILEQASRRMVAEVVVAHRDRLCRFAYDLIEYILKLNGAKLVVLSQDSSSNDETELCQDILAINTVFVCRMQGKRAARYRQERKKQQQKTQETIEINSPLKTPKEDRSNSIPKDLSVPEFLTENIVETMDGLVYNMVVANFNHGHLSTRQYWFRSLLKLKMLHEWNFMKGCPYEVLDHAITHAIQARDEVICRNNELNSDKHHLHFQRKKNNQQTITIRSKSCCKSGSLKFYVRSLHNNQITMSINRHKDNNPLFFPLHHEQRRKNHNWPNLEGKVKMDSKLMFNRKLGYWTFVWVYGKNVENCNDIQVAENLNIVAIDPGVHTGWSWYSPSKGCGWFGNLDINRVFRLSLFLDDLISRTTQAPPKKRNSMKRAQARLQCRIQNLVEECHKKVTLWFLTNFDVIIIPPFNGSAMSHRLNRKINSKTVRKMLTWSHSRFRKRLIFKAEELGKKVIIQNEAYTSKTCSCCGFIKHNLGGSKVFRCNECRVVIDRDFNGARGIFLRALLDGAVCI

SEQ ID NO: 3928 - protein, 621 aa, Gigaspora margarita
MFLTATQASFTLGVSSCTLRRWHRKGKIAAFHSPGGVRLYDVSNIVGSTTTTTSSSSSTPKSYVYARVSSSKQKADLERQQEFLLTKCPQHELVSDIGSGINFKRPGLRTILEQASRRMVAEVVVAHRDRLCRFAYDLIEYILKLNGAKLVVLSQDGSSNDETELCQDILAINTVFVCRMQGKRAARYRQERKKQQQKTQETIEINSPLKTPKEDRSNSIPKDQSVPEFLTENIVETMDGLVYNMVVANFNHGHLSTRQYWFRSLLKLKMLHEWNFMKGCPYEVLDHAITHAIQARDEVICRNNELNSDKHHLHFQRKKDNQQTITIRSKSCCKSGSLKFYVRSLHNNQITMSINRHKDNNPLFFPLHHEQRRKNHNWPNLEGKVKMDSKLMFNRKLGYWTFVWVYGKNVENCNDIQVAENLNIVAIDPGVRTGWSWYSPSKGCGWFGNLDINRVFRLSLFLDDLISRTTQAPPKKRNSMKRAQARLQRRIQNLVEECHKKVTLWFLTNFDVIIIPPFNGSAMSHRLNRKINSKTVRKMLTWSHSRFRKRLIFKAEELGKKVIIQNEAYTSKTCSCCGFIKHNLGGSKVFRCNECGVVIDRDFNGARGIFLRALLDGAVCI

SEQ ID NO: 3929 - protein, 854 aa, Gigaspora margarita
MFLTATQASSTLGVSSCTLRRWHRKGKIAAFHSPGGVRLYDVSNIVGSTTTTTTTTSSSSSSSTPKSYVYARVSSSKQKADLERQQEFLLTKCPQHELVSDIGSGINFKRPGLRTILEQASRRMVAEVVVAHRDRLCRFAYDXCSLLPPRLLPPLVFPRVHFVAGTAKVKLQHFIHQVVCDFTMFQISWAPPPPPPPPPPPPPPPLRQRVMSTHEFQVQSRRQTLSGNKSFSSLSVPNTNSSQTLEVVSTSRDPACAPYWNKQVAEWSQKLWLPTGTDYVDSHMISSNTFLNSMVQNSWFSHKMAPPMTKLNSVKISLPSTLSLSVECKESEQQDIDKNEKNSSRKRKKPLKSTRRSKRQKKTDLTRSLKIRVYPNSSQKTLLKQWMGCARLVYNMVVANFNHGHLSTRQYWFRSLLKLKMLHEWNFMKGCPYEVLDHAITHAIQARDEVICRNNELNSDKHHLHFQRKKNNQQTITIRSKSCCKSGSLKFYVRSLHNNQITMSINLHKDNNPLFFPLHHEQRRKNHNWPNLEGKVKMDSKLMFNRKLGYWTFVWVYGKNVENCNDIQVAENLNIVAIDPGVRTGWSWYSPSKGCGWFGNLDINRVFRLFLFLDDLISRTTQAPPKKRNSMKRAQARLQCRIQNLVEECHKKVTLWFLTNFDVIIIPPFNGSAMSHRLNRKINSKTVRKMLTWSHSRFRKRLIFKAEELGKKVIIQNEAYTSKTCSCCGFIKHNLGGSKVFRCNECRVVIDRDFNGARGIFLRALLDGAKMSNKYNCSKLAIYDVPMSIVQETTREEELLLRTNIIKGLFIQKATEDIIIGQNPVMTYIRDVQDHMCNYDCSVPVRSLQITCSM

SEQ ID NO: 3930 - protein, 629 aa, Gigaspora margarita
MFLTATQASSTLGVSSCTLRRWHRKGKIAAFHSPGGVRLYDVSNIVGSTTTTTTTTSSSSSSSSSSTPKSYVYARVSSSKQKADLERQQEFLLTKCPQHELVSDIGSGINFKRPGLRTILEQANRRMVAEVVVAHRDRLCRFAYDLIEYILKLNGAKLVVLSQDGSSNDETELCQDILAINTVFVCRMQGKRAARYRQERKKQQQKTQETIEINSPLKTPKEDRSNSIPKDQSVPEFLTENIVETMDGLVYNMVVANFNHGHLSTRQYWFRSLLKLKMLHEWNFMKGCPYEVLDHAITHAIQARDEVICRNNELNSDKHHLHFQRKKNNQQTITIRSKSCCKSGSLKFYVRSLHNNQITMSINRHKDNNPLFFPLHHEQRRKNHNWPNLEGKVKMDSKLMFNRKLGYWTFVWVYGKNVENCNDIQVAENLNIVAIDPGVRTGWSWYSPSKGCGWFGNLDINRVFRLSLFLDDLISRTTQAPPKKRNSMKRAQARLQCRIQNLVEECHKKVTLWFLTNFDVIIIPPFNGSAMSHRLNRKINSKTVRKMLTWSHSRFRKRLIFKAEELGKKVIIQNEAYTSKTCSCCGFIKHNLGGSKVFRCNECRVVIDRDFNGARGIFLRALLDGAVCI

SEQ ID NO: 3931 - protein, 628 aa, Gigaspora margarita
MFLTATQASSTLGVSSCTLRRWHRKGKIAAFHSPGGVRLYDVSNIVGSTTTTTTTTSSSSSSSSSTPKSYVYARVSSSKQKADLERQQEFLLTKCLQHELVSDIGSGINFKRPGLRTILEQASRRMVAEVVVAHRDRLCRFAYDLIEYILKLNGAKLVVLSQDGSSNDETELCQDILAINTVFVCRMQGKRAARYQQERKKQQQKTQETIEINSPLKTPKEDRSNSIPKDQSVPEFLTENIVETMDGLVYNMVVANFNHGHLSTRQYWFRSLLKLKMLHEWNFMKGCPYEVLDHAITHAIQARDEVICRNNELNSDKHHLHFQRKKNNQQTITIRSKSCCKSGSLKFYVCSLHNNQITMSINRHKDNNPLFFPLHHEQRRKNHNWPNLEGKVKMDSKLMFNRKLGYWTFVWVYGKNVENCNDIQVAENLNIVAIDPGVRTGWSWYSPSKGCGWFGNLDINRVFRLSLFLDDLISRTTQAPPKKRNSMKRAQARLQCRIQNLVEECHKKVTLWFLTNFDVIIIPPFNGSAMSHRLNRKINSKTVRKMLTWSHSRFRKRLIFKAEELGKKVIIQNEAYTSKTCSCCGFIKHNLGGSKVFRCNECRVVIDRDFNGARGIFLRALLDGAVCI

SEQ ID NO: 3932 - protein, 626 aa, Gigaspora margarita
MFLTATQASSTLGVSSCTLRRWHRKGKIAAFHSPGGVRLYDVSNIVGSTTTTTTTSSSSSSSSTPKSYVYARVSSSKQKADLERQQEFLLTKCPQHELVSDIGSGINFKRPGLRTILEQASCRMVAEVVVAHRDRLCRFAYDLIEYILKLNGAKLVVLSQDGSSNDETELCQDILAINTVFVCRMQGKRAARYRQERKKQQQKTQETIEINSPLKTPKEDRSNSIPKDQSVPEFLTENIVETMDGLVYNMVVANFNHCHLSTRQYWFRSLLKLKMLHEWNFMKGCPYEVLDHAITHAIQARDEVICRNNELNSDKHHLHFQRKKNNQQTITIRSKSCCKSGSLKFYVRSLHNNQITMSINRHKDNNPLFFPLHHEQRRKNHNWPNLEGKVKMDSKLMFNRKLGYWTFVWVYGKNVENCNDIQVAENLNIVAIDPGVRTGWSWYSPSKGCGWFGNLDINRVFRLSLFLDDLISRTTQAPPKKRNSMKRAQARLQCRIQNLVEECHKKVTLWFLTNFDVIIIPPFNGSAMSHRLNRKINSKTVRKMLTWSHSRFRKRLIFKAEELGKKVIIQNEAYTSKTCSCCGFIKHNLGGSKVFRCNECRVVIDRDFNGARGIFLRALLDGAVCI

SEQ ID NO: 3933 - protein, 624 aa, Gigaspora margarita
MFLTATQASSTLGVSLCTLRRWHRKGKIAAFHSPGGVRLYDVSNIVGSTTTTTTTTSSSSSTPKSYVYARVSSSKQKADLERQQEFLLTKCPQHELVSDIGSGINFKRPGLRTILEQASRRMVAEVVVAHRDRLCRFAYDLIEYILKLNGAKLVVLSQDGSSNDETELCQDILAINTVFVCRMQGKRAARYRQGRKKQQQKTQETIEINLPLKTPKEDRSNSIPKDQSVPEFLTENIVETMDGLVYNMVVANFNHGHLSTRQYWFRSLLKLKMLHEWNFMKGCPYEVLDHAITHAIQARDEVICRNNELNSDKHHLHFQRKKNNQQTITIRSKSCCKSGSLKFYIRSLHNNQITMSINRHKDNNPLFFPLHHEQRRKNHNWPNLEGKVKMDSKLMFNRKLGYWTFVWVYGKNVENCNDIQVAENLNIVAIDPGVRTGWSWYSPSKGCGWFGNLDINRVFRLSLFLDDLISRTTQAPPKKRNSMKRAQARLQCRIQNLVEECHKKVTLWFLTNFDVIIIPPFNGSAMSHRLNRKINSKTVRKMLTWSHSRFRKRLIFKAEELGKKVIIQNEAYTSKTCSCCGFIKHNLGGSKVFRCNECRVVIDRDFNGARGIFLRALLDGAVCI

SEQ ID NO: 3934 - protein, 628 aa, Gigaspora margarita
MFLTATQASSTLGVSSCTLHRWHRKGKIAAFHSPGGVRLYDVSNIVGSTTTTTTTTTSSSFSSSSTPKSYVYARVSSSKQKADLERQQEFLLTKCPQHELVSDIGSGINFKRPGLRTILEQASRRMVAEVVVAHRDRLCRFTYDLIEYILKLNGAKLVVLSQDGSSNDETELCQDILAINTVFVCRMQGKRAARYRQERKKQQQKMQETIEINSPLKTPKEDRSNSIPKDQSVPEFLTENIVETMDGLVYNMVVANFNHGHLSTRQYWFRSLLKLKMLHEWNFMKGCPYEVLDHAITHAIQARDEVICRNNELNSDKHHLHFQRKKNNQQTITIRSKSCCKSGSLKFYVRSLHNNQITMSINRHKDNNPLFFPLHHEQRRKNHNWPNLEGKVKMDSKLMFNRKLGYWTFVWVYGKNVENCNDIQVAENLNIVAIDPGVRTGWSWYSPSKGCGWFGNLDINRVFRLSLFLDDLISRTTQAPPKKRNSMKRAQARLQCRIQNLVEECHKKVTLWFLTNFDVIIIPPFNGSAMSHRLNRKINSKTVRKMLTWSHSRFRKRLIFKAEELGKKVIIQNEAYTSKTCSCCGFIKHNLGGSKVFRCNECRVVIDRDFNGARGIFLRALLDGAVCI

SEQ ID NO: 3935 - protein, 626 aa, Gigaspora margarita
MFLTATQASSTLGVSSCTLRRWHRKGKIAAFHSPGGVRLYDVSNIVGSTTTTTTTSTSSSSSSTPKSYVYARVSSSKQKADLERQQEFLLTKCPQHELVSDIGSGINFKRPGLRTILEQASRRMVAEVVVAHRDRLCRFAYDLIEYIRKLNGAKLVVLSQDGSSNDETELCQDILAINTVFVCRMQGKRAARYRQERKKQQQKTQETIEINSPLKTPKEDRSNSIPKDQSVPEFLTENIVETMDGLVYNMVVANFNHGHLSTRQYWFRSLLKLKMLHEWNFMKGCPYEVLDHAITHAIQARDEVICRNNELNSDKHHLHFQRKKNNQQTITIRSKSCCKSGSLKFYVRSLHNNQITMSINRHKDNNPLFFPLHHEQRRKNHNWPNLEGKVKMDSKLMFNRKLGYWTFVWVYGKNVENCNDIQVAENLNIVAIDPGVRTGWSWYSPSKGCGWFGNLDINRVFRLSLFLDDLISRTTQAPPKKRNSMKRAQARLQCRIQNLVEECHKKVTLWFLTNFDVIIIPPFNGSAMSHRLNRKINSKTVRKMLTWSHSRFRKRLIFKAEELGKKVIIQNEAYTSKTCSCCGFIKHNLGGSKVFRCNECRVVIDRDFNGARGIFLRALLDGAVCI

SEQ ID NO: 3936 - protein, 637 aa, Gigaspora margarita
MFLTATQASSTLGVSSCTLRRWHRKGKIAAFHSPGGVRLYDVSNIVGSTTTTTTTTSSSSSSSTPKSYVYARVSSSKQKADLERQQEFLLTKCPQHELISDIGSGINFKRPGLRTILEQASRRIVAEVVVAHRDRLCRFAYDLIEYILKLNGAKLVVLSQDGSSNDETELCQDILAINTVFVCRMQGKRAARYRQERKKQQQKTQETIEINSPLKKTDLTRSLKIRVYPNSSQKTLLKQWMGCARLVYNMVVANFNHGHLSTRQYWFRSLLKLKMVHEWNFMKGCPYEVLDHAITHAIQARDEVICQNNELNSDKHHLHFQRKKNNQQTITIRSKSCCKSGSLKFYVCSLHNNQITMSINRHKDNNPLFFPLHHEQRRKNHNWPNLEGKVKMDSKLMFNRKLGYWTFVWVYGTLRQHQSMQGGKNVENCNDIQVAENLNIVAIDPGVRTGWSWYSPSKGCGWFGNLDINRVFRLSLFLDDLISRTTQAPPKKRNSMKRAQARLQCRIQNLVEECHKKVTLWFLTNFDVIIIPPFNGSAMSHRLNRKINSKTVRKMLTWSHSRFRKRLIFKAEELGKKVIIQNEAYTSKTCSCCGFIKHNLGGSKVFRCNECRVMIDRDFNGARGIFLRALLDGAVCI

SEQ ID NO: 3937 - protein, 626 aa, Gigaspora margarita
MFLTATQASSTLGVSSCTLRRWHRKGKIAAFHSPGGVRLYDVSNIVGSTTTTTTTSSSSSSSSTPKSYVYARVSSSKQKADLERQQEFLLTKCPQHELVSDIESGINFKRPGLRTILEQASRRMVAEVVVAHRDRLCRFAYDLIEYILKLNGAKLVVLSQDGSSNDETELCQDILAINTVFVCRMQGKRAARYRQERKKQQQKTQETIEINSPLKTPKEDRSNSIPKDQSVPEFLTENIVETMDGLVYNMVVANFNHGHLSTRQYWFRSLLKLKMLHEWNFMKGCPYEVLDHAITHAIQARDEVICRNNELNSDKHHLHFQRKKNNQQTITIRSKSCCKSGSLKFYVRSLHNNQITMSINRHKDNNPLFFPLHHEQRRKNHNWPNLEGKVKMDSKLMFNRKLGYWTFVWVYGKNVENCNDIQVAENLNIVAIDPGVRTGWSWYSPSKGCGWFGNLDINRVFRLSLFLDDLISRTTQAPPKKRNSMKRAQARLQCRIQNLVEECHKKVTLWFLTNFDVIIIPPFNGSAMSHRLNRKINSKTVRKMLTWSHSRFRKRLIFKAEELGKKVIIQNEAYTSKTCSCCGFIKHNLGGSKVFRCNECRVVIDRDFNGARGIFLRALLDGAVCI

SEQ ID NO: 3938 - protein, 503 aa, Gigaspora margarita
MIPQPPPLLKRKVSYTHVSQVTKKKKTFKDRNRSLNPDSRIISSSMMSGQVSTSKETGLRPYWNDQVKEWSQKLWLPTVTDSANSDLTSLNLCSYHTLQNSWFSSTNKVPTNMDILAINTVFICRTQEREDKNNKSTKQKKTKNRNCCESNITNQNIKPHTLNEKLKLYIDVKEGKDLNEKDKKLQRSCVWGERKFLRTVAWLELRLKGLHDKVPIYVTQLHSSLTLLSKRCKSNKLESGKRDLRPFHFEKKRKHNKWPLQKIDCDCKLTYLRKTNEWIFHWVYEAQKQICETQADVHVIAIDPGVRTPFTWYSSTKGVGKIGEYDIGRIFRLCKHMDNLISKKDRLASSISKRKKKKALRVDKAIFRMKRKIKRLRDEVHRKTIKFLTDEFDMIIIPPFEVSDMVNRKSRKITRKTVRKMLCWSHYKFRQRLISKAEEKGIHVVIQNEAYTSKTCSWCGNIQNIGGSEKYNCKNCGIKIDRDVNGARGIFLRALLDGAMILS

SEQ ID NO: 3939 - protein, 623 aa, Gigaspora margarita
MFLTATQASSTLGVSSCTLRRWHRKGKIAAFHSPGGVRLYDVSNIVGSTTTTTTSSSSSSTPKSYVYARVSSSKQKADLERQQEFLLTKCPQHELVSDIGSGINFKRPGLRTILEQASRRMVAEVVVAHRDRLCRFAYDLIEYILKLNGAKLVVLSQDGSSNDETELCQDILAINTVFVCRMQGKRAARYRQERKKQQQKTQETIEINSPLKTPKEDRSNSIPKDQSVPEFLTENIVETMDGLVYNMVVANFNHGHLSTRQYWFRSLLKLKILHEWNFMKGCPYEVLDHAITHAIQARDEVICRNNELNSDKHHLHFQRKKNNQQTITIRSKSCCKSGSLKFYVRSLHNNQITMSINRHKDNNPLFFPLHHEQRRKNHNWPNLEGKVKMDSKLMFNRKLGYWTFVWVYGKNVENCNDIQVAENLNIVAIDPGVRTGWSWYSPSKGCGWFGNLDINRVFRLSLFLDDLISRTTQAPPKKRNSMKRAQARLQRRIQNLVEECHKKVTLWFLTNFDVIIIPPFNGSAMSHRLNRKINSKTVRKMLTWSHSRFRKRLIFKAEELGKKVIIQNEAYTSKTCSCCGFIKHNLGGSKVFRCNECGVVIDRDFNGARGIFLRALLDGAVCI

SEQ ID NO: 3940 - protein, 625 aa, Gigaspora margarita
MFLTATQASSTLGVSSCTLRRWHRKGKIAAFHSPGGVRLYDVSNIVGSTTTTTTTSSSSSSSTPKSYVYARVSSSKQKADLERQQEFLLTKCPQHELVSDIGSGINFKRPGLRTILEQASRRMVAEVVVAHRDRLCRFAYDLIEYILKLNGAKLVVLSQDGSSNDETELCQDILAINTVFVCRMQGKRAARYRQERKKQQQKTQETIEINSPLKTPKEDRSNSIPKDQSVPEFLTENIVETMDGLVYNMVVANFNHGHLSTRQYWFRSLLKLKMLHEWNFMKGCPYEVLDHAITHAIQARDEVICRNNELNSDKHHLHFQRKKNNQQTITIRSKSCCKSGSLKFYVRSLHNNQITMSINRHKDNNPLFFPLHHEQRRKNHNWPNLEGKVKMDSKLMFNRKLGYWTFVWVYGKNVENCNDIQVAENLNIVAIDPGVRTGWSWYSPSKGCGWFGNLDINRVFRLSLFLDDLISRTTQAPPKKRNSMKRAQARLQCRIQNLVEECHKKVTLWFLTNFDVIIIPPFNGSAMSHRLNRKINSKTVRKMLTWSHSRFRKRLIFKAEELGKKVIIQNEAYTSKTCSCCGFIKHNLGGSKVFRCNECRVVIDRDFNGARGIFLRALLDGAVCI

SEQ ID NO: 3941 - protein, 613 aa, Gigaspora margarita
MIPQPPPLPKRKVFYTHVPQVKKKTLKDRNRSLNPDSRIMSSSMMSVQVSTSKKTDLRPYWNNQVKEWSQKLWLPTMXDSADSHLTSLNLCSHYTLXNSWFSSTNQVPTNMKYHKISLQLTPSLSVEYKEEDQLCTEEXGKPKTIKARSKKKRKIETTVNRTLSIKXYPNHSQKKILKRWLGLMRYAYNTVVRWNKNRRFCNSSKNFEWIKPYXLNEKLKLYTDIKEGKDLNEKDKKLWRSCAWGERKFLRTVVWLELRLKGLHDKVPANIIDESIDDALIARKNIIQKNLKDTKKSFLSFKSKKDLRQTMTIRAQNFSKKDWNHFYVTHLHNSSTLLSKRCKPNDFEGGKRDLCPFHFEKKRKHNKWPSQRIDCDCKLTYLHKTXEWIFYWVYEAQKQIXETQADVHVVSIDPGVRTXFTWYSSTKGAGKIGEYDIGRIFRLCKHMDDLISKKDRLXSSISKXKKKKALRVDKAIFRMKRKIRRLQEEIHRKTIKFLTDEFDMIIIPSFEVSNMVNRKTRKIARKIVRKMLCWSHYKFRQRLISKAEEKGINVIIQNEAYTSKTCSWCGNIQNIGGSEMYKCKNCNIKIDRDVNGGRGIFLRALLDRALILS

SEQ ID NO: 3942 - protein, 657 aa, Gigaspora margarita
MFQISWAPPPLPPPPPPPPPPPLRQRVMSTHEFQVQSRRQTLSGNKSFSSLSVPNTNSSQTLEVVSTSRDPACAPYWNKQVAEWSQKLWLPTGTDYVDSHMISSNTFLNSMVQNSWFSHKMAPPMTKLNSVKISLPSTLSLSVECKESEQQDIDKNEKNSSRKRKKPLKSTRRSKRQKKTDLTRSLKIRVYPNSSQKTLLKQWMSCARLVYNMVVANFNHGHLSTRQYWFRSLLKLKMLHEWNFMKGCPYEVLDHAITHAIQARDEVICRNNELNSDKHHLHFQRKKNNQQTITIRSKSCCKSGSLKFYVRSLHNNQITMSINRHKDNNPLFFPLHHEQRRKNHNWPNLEGKVKMDSKLMFNRKLGYWTFVWVYGKNVENCNDIQVAENLNIVAIDPGVRTGWSWYSPSKGCGWFGNLDINRVFRLSLFLDDLISRTTQAPPKKRNSMKRAQARLQCRIRNLVEECHKKVTLWFLTNFDVIIIPPFNGSAMSHRLNRKINSKTVRKMLTWSHSRFRKRLIFKAEELGKKVIIQNEAYTSKTCSCCGFIKHNLGGSKVFRCNECRVVIDRDFNGARGIFLRALLDGAVSLSDPIDVYSDWVDASEHVRPEGHLSHGDYDDDNEHEREEDDEGSYHQSSHRVIGGGRSPDFDDYDDLEE

SEQ ID NO: 3943 - protein, 626 aa, Gigaspora margarita
MFLTATQASSTLGVSSCTLRRWHRKGKIAAFHSPGGVRLYDVSNIVGSTTTTTTSSSSSSSSSTPKSYVYARVSSSKQKADLERQQEFLLTKCPQHELVSDIGSGINFKRPGLRTILEQASRRMVAEVVVVHRDRLCRFAYDLIEYILKLNGAKLVVLSQDGSSNDETELCQDILAINTVFVCRMQGKRAARYRQERKKQQQKTQETIEINSPLKTPKEDRSNSIPKDQSVPEFLTENIVETMDGLVYNMVVANFNHGHLSTRQYWFRSLLKLKMLHEWNFMKGCPYEVLDHAITHAIQARDEVICRNNELNSDKHHLHFQRKKNNQQTITIRSKSCCKSGSLKFYVRSLHNNQITMSINRHKDNNPLFFPLHHEQRRKNHNWPNLEGKVKMDSKLMFNRKLGYWTFVWVYGKNVENCNDIQVAENLNIVAIDPGVRTGWSWYSPSKGCGWFGNLDINRVFRLSLFLDDLISRTTQAPPKKRNSMKRAQARLQCRIQNLVEECHKKVTLWFLTNFDVIIIPPFNGSAMSHRLNRKINSKTVRKMLTWSHSRFRKRLIFKAEELGKKVIIQNEAYTSKTCSCCGFIKHNLGGSKVFRCNECRVVIDRDFNGARGIFLRALLDGAVCI

SEQ ID NO: 3944 - protein, 430 aa, Gigaspora margarita
MRYAYNTVVRWNKNRRFCNSSKNFEWIKPYTLNEKLKLYTDIKEGKDLNEKDKKLRRSCVWGERKFLRTVVWLELRLKGLHDKVPANIIDESIDDALIARKNIIQKNLKDTKKSFLSFKSKKDLRQTMTIRAQNFSKKDWNHFYVTHLHNSSTLLSKRCKPNDFEGGKRDLCPFHFEKKRKHNKWPSQRIDCDCKLTYLHKTNEWIFYWVYEAQKQIRETQADVHVVSIDPGVRTPFTWYSSTKGAGKIGEYDIGRIFRLCKHMDDLISKKDRLASSISKRKKKKALRVDKAIFRMKRKIRXLQEEIHRKTIKFLTDEFDMIIIPSFEVSNMVNRKTRKITRKTVRKMLCWSHYKFRQRLISKAEEKGINVIIQNEAYTSKTCSWCGNIQNIGGSETYKCKNCNIKIDRDVNGARGIFLRALLDGAMILS

SEQ ID NO: 3945 - protein, 223 aa, Gigaspora margarita
MYHLHIPIPLSMRNKKEGRIISLDPGVRSFLTGYDPGGNVVEFCKNDFSRLSRLCIRHDKYQSQSTKVNSRKRYVIKRKMRRIYHKIHNLVNDCHKKIAKYLCDNYQTIVLPIFKTQEMVRRAKRQIRTKTALNMLTWSHFRFRQFLLHKMSEYPGRRLIICTEEYTSKTCGRCGYIKNNLGGNKKFKCNECGLIIDRDVNGARNILLKLLSQVTPDAVAYHP

SEQ ID NO: 3946 - protein, 393 aa, Gigaspora margarita
MVIDEIKFILNSSAVAVDNPKGLIRRVWIWLTLLCCLRGGNAKWLKASWLKELDDGGMRLELPKEKNHARGIKDPYAESGSSFIPPDIPENAYTPVADIRRYLYKRPNNVDADYFFVSINTPKNIYRGDWYLASKLGKGTQDTMVHSICKDAKLDFKDRCITNHSMRSTGIHNLVELGVTLDEQMIFFSPQNYRRSFCLSASIIKTQARQCFPFDSKPDSRIVLKDLTSNYTNEIEFSKASELLSSKSEVYDKVKDDESRAESDDEANSANRGKTYHMMKKYKDSLADLNKSLAINSNNVFTFSKTWRNGRTKTARNMLTWSHFRFRQFLLHKMSEYPGRRLIICTEEYTSKTCGRCGYIKNNLGENKKFKCDECGLIIDKDVNGRETSCLNC

SEQ ID NO: 3947 - protein, 679 aa, Gigaspora margarita
MFLTATQASXTLGVSSCTLRRWHRKGKIAAFHSPGGVRLYDVSNIVGSTTTTTTTSSSSSSSSTPKSYVYARVSSSKQKADLERQQEFLLTKSPQHELVSDIGSGINFKRPGLRTILEQASRRMVAEVVVAHRDRLCRFAYDLIEYILKLNGAKLVVLSQDGSSNDETELCQDILAINTVFVCRMQGKRAARYRQERKKQQQKTQEIIEINSPLKTPKEDRSNSIPKDQSVPEFLTENIVKTMDGLVYNMVVANFNHGHLSTRQYWFRSLLKLKMLHEWNFMKGCPYEVLDHAITHAIQARDEVICRNNELNSDKHHLHFQRKKNNQQTITIRSKSCCKSGSLKFYVRSLHNNQITMSINRHKDNNPLFFPLHHEQRRKNHNWPNLEGKVKMDSKLMFNRKLGYWTFVWVYGKNVENCNDIQVAENLNIVAIDPGVRTGWSWYSPSKGCGWFGNLDINRVFRLSLFLDDLISRTTQAPPKKRNSMKRAQARLQCRIQNLVEECHKKVTLWFLTNFDVIIIPPFNGSAMSHRLNRKINSKTVRKMLTWSHSRFRKRLIFKAEELGKKVIIQNEAYTSKTCSCCGFIKHNLGGSKVFRCNECRVVIDRDFNGAXGIFLRALLDGAMTTKIIEKLLNDYIEHLNDEEDFNVIVKVEKILDMKTFKTHSVILRNQSLYFHNEF

SEQ ID NO: 3948 - protein, 326 aa, Gigaspora margarita
MGQGSWVFSSDICTNDNKTGELAKELLSIVTVFVARHNGLHSAANCKRRKETAQEIQKFQEGSNETSSRQGTTHSSFSHPGGTYNQSLIAVEKEGVKRKRKDLRACCLNAVNFQNKSKLKWILETLYDIRDEATNVYLKDISLISRLVINHLGEFYLCIPESLEIRAENQDYLHILTTIKKNGGSGVIALDPGIRTFMTGYDPSGMAIEWGKNDICRIYRLCHIQTNRLRRVMLLSSSRMSLQREPCVRGRFRQYLSHKAREHPWCRIILCTEEYTSITCGFCGYIYRKLGGSKAFRCPEYKTELDRDINGARNILLRYLTKKESV

SEQ ID NO: 3949 - protein, 585 aa, Gigaspora margarita
MFLTATQASXTLGVSSCTLRRWHRKGKIAAFHSPGGVRLYDVSNIVGSTTTTSSSSSSSSTPKSYVYARVSSSKQKADLERQQEFLLTKCPQHELVSDIGSGINFKRPGLRTILEQASRRMVAEVVVSHRDRLCRFAYDLIEYILKLNGAKLVVLSQDGSSNDETELCQDILAINTVFVCRMQGKRAARYRQERKKQQQKTQETIEINSPLKTPKEDRSNSIPKDQSVPEFLTENIVETMDGLVYNMVVANFNHGHLSTRQYWFRSLLKLKMLHEWNFMKGCPYEVLDHAITHAIQARDEVICRNNELNSDKHHLHFQRKKNNQQTITIRSKSCCKSGSLKFYVRSLHNNQITMSINRHKDNNPLFFPLHHEQRRKNHNWPNLEGKVKMDSKLMFNRKLGYWTFVWGCGWFGNLDINRVFRLSLFLDDLISRTTQAPPKKRNSMKRAQARLQCRIQNLVEECHKKVTLWFLTNFDVIIIPPFNGSAMSHRLNRKINSKTVRKMLTWSHSRFRKRLIFKAEELGKKVIIQNEAYTSKTCSCCGFIKHNLGGSKVFRCNECGVVIDRDFNGARGIFLRALLDGAVCI

SEQ ID NO: 3950 - protein, 608 aa, Gigaspora margarita
MFLTATQASFTLGVSSYRLRRWHRKGKIAAFHSPGGVRLYDVSNIVGSIITTTTTTSSSSSSSSTPKSYVYTRVSSSKQKADLERQQEFLLTKCPQHELVSDIGSGINFKRPGLCTILEQASRRMVAEVVVAHRDRLCRFAYDLIEYILKLNGAKLLVLSQDGSSNDETELCQDILAINTVFVCRMQGKRAASSRKHKKPLKSTRRSKRQKKTDLTRSLKIRVYPNSSQKTLLKQWMGCARLVYNMVVANFNHGHLSTRQYWFRSLLKLKMLHEWNFMKGCPYEVLDHAITHAIQARDEVICRNNELNSDKHHLHFQRKKNNQQTITIRSKSCCKSGSLKFYVRSLHNNQITMSINRHKDNNPLFFPLHHEQRRKNHNWLNLEGKVKMDSKLMFNRKLGYWTFVWVYGKNVENCNDIQVAENLNIVAIDPGVRTGWSWYSPSKGCGWFGNLDINRVFRLSLFLDDLISRTTQAPPKKRNSMKRAQARLQCRIQNLVEECHKKVTLWFLTNFDVIIIPPFNGSAMSHRLNRKINSKTVRKMLTWSHSRFRKRLIFKAEELGKKVIIQNEAYTSKTCSCCGFIKHNLGGSKVFRCNECRVVIDRDFNGAR

SEQ ID NO: 3951 - protein, 626 aa, Gigaspora margarita
MFLTATQASSTLGVSSCTLRRWHRKGKIAAFHSPGGVRLYDVSNIVGSTTTTTTSSSSSSSSSTPKSYIYARVLSSKQKADLERQQEFLLTKCPQHELVSDIGSGINFKRPGLRTILEQASRRXVAEVXVAHRDRLCRFAYDLIEYILKLNGAKLVVLSQDGSSNDETELCQDILAINTVFVCRMQGKRAARYRQERKKQQQKTQETIEINSPLKTPKEDRSNSIPKDQSVPEFLTENIVETMDGLVYNMVVANFNHGHLSTRQYWFRSLLKLKMLHEWNFMKGCPYEVLDHAITHAIQARDEVICRNNELNSDKHHLHFQRKKNNQQTITIRSKSCCKSGSLKFYVRSLHNNQITMSINRHKDNNPLFFPLHHEQRRKNHNWPNLEGKVKMDSKLMFNRKLGYWTFVWVYGKNVENCNDIQVAENLNIVAIDPGVRTGWSWYSPSKGCGWFGNLDNNRVFRLSLFLDDLISRTTQAPPKKRNSMKRAQARLQCRIQNLVEECHKKVTLWFLTNFDVIIIPPFNGSAMSHRLNRKINSKTVRKMLTWSHSRFRKRLIFKAEELGKKVIIQNEAYTSKTCSCCGFIKHNLGGSKVFRCNECRVMIDRDFNGARGIFLRALLDGAVCI

SEQ ID NO: 3952 - protein, 625 aa, Gigaspora margarita
MFLTATQASSTLGVSSCTLRRWHRKGKIAAFHSPGGVRLYDVSNIVGSTTTTTTSSSSSSSSTPKSYVYARVSSSKQKADLERQQEFLLTKCPQHELVSDIGSGINFKRPGLRTILEQASRRMVAEVVVAHRDRLCRFTYDLIEYILKLNGAKLVVLSQDGSSNDETELCQDILAINTVFVCRMQGKRAARYRQERKKQQQKTQETIEINSPLKTPKEDRSNSIPKDPSVLEFLTENIVETMDGLVYNMVVANFNHGHLSTRQYWFRSLLRLKMLHEWNFMKGCPYEVLDHAITHAIQARDEVICRNNELNSDKHHLHFQRKKNNQQTITIRSKSCCKSGSLKFYVRSLHNNQITMSINRHKDNNPLFFPLHHEQRRKNHNWPNLEGKVKMDSKLMFNRKLGYWTFVWVYGKNVENCNDIQVAENLNIVAIDPGVRTGWSWYSPSKGCGWFGNLDINRVFRLSLFLDDLISRTTQAPPKKRNSMKRAQARLQCRIQNLVEECHKKVTLWFLTNFDVIIIPPFNGSAMSHRLNRKINSKTVRKMLTWSHSRFRKRLIFKAEELGKKVIIQNEAYTSKTCSCCGFIKHNLGGSKVFRCNECRVVIDRDFNGARGIFLRALLDGAVCI

SEQ ID NO: 3953 - protein, 384 aa, Gigaspora margarita
MDGLVYNMVVANFNHGHLSTRQYWFRSLLKLKMLHEWNFMKGCPYEVLDHAITHAIQARDVVICQNNELNSDKHHVHFQRKKNNQQTITIRSKSCCKSGSLKFYVRSLHNNQITMSINHHKDNNPLFFPLHHEQRRKNHNWPNLEGKVKMDSKLMFNRKLGYWTFVWVYGKNVENCNDIQVAENLNIVAIDPGVRTGWSWYSPSKGCGWFGNLDINRVFRLSLFLDDLISRTTQAPPKKRNSMKRAQARLRCRIQNLVEEYHKKVTLWFLTNFDVIIIPPFNGSAMSHRLNQKINSKTVRKMLTWSHSRFRKRLIFKAEELGKKVIIQNEAYTSKTCSCCGFIKHNLGGSKVFRCNECRVVIDRDFNGARGIYLRALLDGAVCI

SEQ ID NO: 3954 - protein, 625 aa, Gigaspora margarita
MFLTATQASSTLGVSSCTLRRWHHKGKIAAFHSPGGVRLYDVSNIVGSTTTTTTSSSSSSSSTPKSYVYARVSSSKQKADLERQQEVLLTKCPQHELVSDIGSGINFKRPGLRTILEQASRRMVAEVVVAHRDRLCRFAYDLIEYILKLNGAKLVVLSQDGSSNDETELCQDILAINTVFVCRMQGKRAARYRQERKKQQQKMQETIEINSPLKMPKEDRSNSIPKDQSVPEFLTENIVETMDGLVYNMVVANFNHGHLSTRQYWFRSLLKLKMLHEWNFMKGCPYEVLDHAITHAIQARDEVICRNNELNSDKHHLHFQRKKNNQQTIAIRSKSCCKSGSLKFYVRSLHNNQITMSINRHKDNNPLFFPLHHEQCRKNHNWPNLEGKVKMDSKLMFNRKLGYWTFVWVYGKNVENCNDIQVAENLNIVAIDPGVRTGWSWYSPSKGCGWFGNLDINHVFRLSLFLDDLISRTTQAPPKKRNSMKRAQARLQCRIQNLVEECHKKVTLWFLTNFDVIIIPPFNGSAMSHRLNRKINSKTVRKMLTWSHSRFRKRLIFKAEELGKKVIIQNEAYTSKTCSCCGFIKHNLGGSKVFRCNECRVVIDRDFNGARGIFLRALLDGAVCI

SEQ ID NO: 3955 - protein, 625 aa, Gigaspora margarita
MFLTATQASSTLGVSLCTLRRWHRKGKIAAFHSPGGVRLYDVSNIVGSTTTTTTTSSSSSSSTPKSYVYARVSSSKQKADLERQQEFLLTKCPQHELVSDIGSGINFKRPGLRTILEQASRRMVAEVVVAHRDRLCRFAYDLIEYILKLNGAKLVVLSQDGSSNDETELCQDILAINTVFVCRMQGKRAARYRQERKKQQQKTQETIEINSPLKTPKEDRSNSIPKDQSVPEFLTENIVETMDGLVYNMVVANFNHGHLSTRQYWFRSLLKLKMLHEWNFMKGCPYEVLDHAITHAIQARDEVICRNNELNSDKHHLHFQRKKNNQQTITIRSKSCCKSGSLKFYVRSLHNNQITMSINRHKDNNPLFFPLHHEQRRKNHNWPNLEGKVKMDSKLMFNRKLGYWTFVWVYGKNVENCNDIQVAENLNIVAIDPGVRTGWSWYSPSKGCGWFGNLDINRVFRLSLFLDDLISRTTQAPPKKRNSMKRAQARLRCRIQNLVEECHKKVTLWFLTNFDVIIIPPFNGSAMSHRLNRKINSKTVRKMLTWSHSRFRKRLIFKAEELGKKVIIQNEAYTSKTCSCCGFIKHNLGGSKVFRCNECRVVIDRDFNGARGIFLRALLDGAVCI

SEQ ID NO: 3956 - protein, 639 aa, Gigaspora margarita
MFLTATQASSTLGVSSCTLRRWHRKGKIAAFHSPGGVRLYDVSNIVAPPPPPPPPPPPPPPLRQRVMSTHEFQVQSRRQTLSGNKSFSSLSVPNTNSSQTLEVVSTSRDPACAPYWNKQVAEWSQKLWLPTGTDYVDSHMISSNTFLNSMVQNSWFSHKMAPPMTKLNSVKISLLSTLSLSVECKESEQQDIDKNEKNSSRKRKKPLKSTRHSKRQKKTDLTRSLKIRVYPNSSQKTLLKQWMGCARLVYNMVVANFNHGHLSTHQYWFRSLLKLKMLHEWNFMKGCPYEVLDHAITHAIQAQDEVICRNNELNSDKHHLHFQRKKNNQQTITIRSKSCCKSGSLKFYVRSLHNNQITMSINRHKDNNPLFFPLHHEQRRKNHNWPNLEGKVKMDSKLMFNRKLGYWTFVWVYDTLKQHQSMHGGKNVENCNDIQVAENLNIVAIDPGVRTGWSWYSPSKGCGWFGNLDINRVFRLSLFLDDLISRTTQAPSKKRNSIKRAQARLQCRIKNLVEECHKKVTLWFLTNFDVIIIPPFNGSAMSHRLNRKINSKTVRKMLTWSHSRFRKRLIFKAEELGKKVIIQNEAYTSKTCSCCGFIKHNLGGSKVFRCNECRVVIDRDFNGARGIFLRALLDGAVCI

SEQ ID NO: 3957 - protein, 546 aa, Gigaspora margarita
MIPQPPPLPKRKVFYTHVPQVKKKTLKDRNRSLNPDSRIMSSSMMSVQVSTSKKTDLRPYWNNQVKEWSQKLWLPTMTDSADSHLTSLNLCSHYTLRNSWFSSTNQVPTNMKYHKISLQSTPSLSVEYKEEDQLCTEESGKPKTIKAXSKKKXKIETTVNRTLSIKTYPNHSQKKILKRWLGLMRYAYNTVVRWNKNRRFCNSSKNFEWIKPYTLNEKLKLYTDIKEGKDLHVYGENKDLRQTMTIRAQNFSKKDWNHFYVTHLHNSSTLLSKRCKPNDFEGGKRDLCPFHFEKKRKHNKWPSQRIDCDCKLTYLHKTNEWIFYWVYEAQKQIRETQADVHVVSIDPGVRTPFTWYSSTKGAGKIGEYDIGRIFRLCKHMDDLISKKDRLASSISKRKKKKALRVDKAIFRMKRKIRRLQEEIHRKTIKFLTDEFDMIIIPSFEVSNMVNRKTRKITRKTVRKMLCWSHYKFRQRLISKAEEKGINVIIQNEAYTSKTCSWCGNIQNIGGSETYKCKNCNIKIDRDVNGARGIFLRALLDGAMILS

SEQ ID NO: 3958 - protein, 600 aa, Gigaspora margarita
MIPQPPPLPKRKVSYTHVTKVTNKRKTFKDRNRSLNPDSRIMGSSGQVSTSKEMDLRPYWNDQVKEWSQKLWLPTVTDSADSHLTSLNLCSHYTLQDLWFSSTNQVPTNMNYHKISLLSLSVEEEQLCTEESGKRKLKTINARSKKKQKIETTVNRTLSIKTYPNHSQKKILKRWLGLTRYAYNTVVRWDKSRRFCNSSKNFEWIKPHTLNEKLKLYIDVKDKKLQRSCVWGERKFLRTVAWLELRLKGLHDKVPANIIDESIDDALKARKNIIQKNLKETKKSSLSFKSKKDLRQTMTIRMQNFSKKDWNHFYVTQLHSSLTLLSKRCKSNKLESGKRDLRPFHFEKKRKHNKWPLQKIDCDCKLTYLRKTNEWIFHWVYEAQKQIRETQADVHVIAIDPGVRTPFTWYSSTKGVGKIEEYDIGRIFRLCKHMDNLISKKDRLTYSISKRKKKKALRVDKAIFRMKRKINQLRDEVHRKTIKFLTDEFDMIIIPPFEVSDMVNRKSRKITRKTVRKMLCWSHYKFRQRLISKAEEKGIHVVIQNEAYTSKTCSWCGNIQNIGGSEMYNCKNCSIKIDRDVNGARGIFLRALLDGVMILS

SEQ ID NO: 3959 - protein, 625 aa, Gigaspora margarita
MFLTATQASSTLGVSSCTLRRWHRKGKIAAFHSPGGVRLYDVSNIVGSTTTTTTSSSSSSSSTPKSYVYARVSSSKQKADLERQQEFLLTKCPQHELVSDIGSGINFKRPGLRTILEQASRRMVAEVVVAHRDRLCRFAYDLIEYILKLNGAKLVVLSQDGSSNDETELCQDILAINTVFVCRMQGKRAARYRQERKKQQQKTQETIEINSPLKTPKEDRSNSIPKDQSVPEFLTENIVETMDGLVYNMVVANFNHGHLSTRQYWFRSLLKLKMLHEWNFMKGCPYEVLDHAITHAIQARDEVICRNNELNSDKHHLHFQRKKNNQQTITIRSKSCCKSGSLKFYVRSLHNNQITMSINRHKDNNPLFFPLHHEQRRKNHNWPNLEGKVKMDSKLMFNRKLGYWTFVWVYGKNVENCNDIQVAENLNIVAIDPGVRTGWSWYSPSKGCGWFGNLDINRVFRLSLFLDDLISRTTQAPPKKRNSMKRAQARLRCRIQNLVEECHKKVTLWFLTNFDVIIIPPFNGSAMSHRLNRKINSKTVRKMLTWSHSRFRKRLIFKAEELGKKVIIQNEAYTSKTCSCCGFIKHNLGGSKVFRCNECRVVIDRDFNGARGIFLRALLDGAVCI

SEQ ID NO: 3960 - protein, 623 aa, Gigaspora margarita
MFLTATQASSTLGVSSCTLRRWHRKGKIAAFHSPGGVRLYDVSNIVGSTTTTSSSSSSSSTPKSYVYARVSSSKQKADLERQQEFILTKCPQHELVSDIGSGINFKRPGLRTILEQASRRMVAEVVVAHRDRLCRFAYDLIEYILKLNGAKLVVLSQDGSSNDETELCQDILAINTVFVCRMQGKRAARYRQERKKQQQKTQETIEINSPLKTPKEDRSNSIPKDQSVPEFLTENIVETMDGLVYNMVVANFNHGHLSTRQYWFRSLLKLKMLHEWNFMKGCPYEVLDHAITHAIQARDEVICRNNELNSDKHHLHFQRKKDNQQTITIRSKSCCKSGSLKFYVRSLHNNQITMSINRHKDNNPLFFPLHHEQRRKNHNWPNLEGKVKMDSKLMFNRKLRYWTFVWVYGKNVENCNDIQVAENLNIVAIDPGVRTGWSWYSPSKGCGWFGNLDINRVFRLSLFLDDLISRTTQAPPKKRNSMKRAQARLQRRIQNLVEECHKKVTLWFLTNFDVIIIPPFNGSAMSHRLNRKINSKTVRKMLTWSHSRFRKRLIFKAEELGKKVIIQNEAYTSKTCSCCGFIKHNLGGSKVFRCNECGVVIDRDFNGARGIFLRALLDGAVCI

SEQ ID NO: 3961 - protein, 626 aa, Gigaspora margarita
MFLTATQASSTLGVSSCTLRRWHRKSKIAAFHSPGGVRLYDVSNIVGSTTTTTTTTSSSSSSSTPKSYVYARVSSSKQKADLERQQEFLLTKCPQHELVSDIGSGINFKRPGLRTILEQASRRMVAEVVVAHRDRLCRFAYDLIEYILKLNGAKLVVLSQDGSSNDETELCQDILAINTVFVCRMQGKRAARYRQERKKQQQKTQETIEINSPLKTPKEDRSNSIPKDQSVPEFLTENIVETMDGLVYNMVVANFNHGHLSTRQYWFRSLLKLKMLHEWNFMKGCPYEVLDHAITHAIQARDEVICRNNELNSDKHHLHFQRKKNNQQTITIRSKSCCKSGSLKFYVRSLHNNQITMSINRHKDNNPLFFPLHHEQRRKNHNWPNLEGKVKMDSKLMFNRKLGYWTFVWVYGKNVENCNDIQVAENLNIVAIDPGVRTGWSWYSPSKGCGWFGNLDINRVFRLSLFLDDLISRTTQAPPKKRNSMKRAQARLRCRIQNLVEECHKKVTLWFLTNFDVIIIPPFNGSAMSHRLNRKINSKTVRKMLTWSHSRFRKRLIFKAEELGKKVIIQNEAYTSKTCSCCGFIKHNLGGSKVFRCNECRVVIDRDFNGARGIFLRALLDGAVCI

SEQ ID NO: 3962 - protein, 512 aa, Gigaspora margarita
MPSSVEYVEEQLCTEENQKRKKMIKTRSKKKQKEEMLLNRTLSIKTYPNHLQKRILKRWLGLTRYAYNTVVRWDKSHRRCDSSKHFEWIKPQTLSKRLKLYIDVKKDKDPKVEDKKLQQLCVWGNVNFFVQLYDKKLQQLCVWGERKFLHTVVWLELHLKGLHDKVPTNVINESIDEALIARKNIIQKNSKETKKSSLSFRSKKGLWQTMTIRVQNFSKKDWNHFYTTYLHNSSTLLSKRYKSNKLESGKRDLRPFHFEKKRKHNKWPLQKIDCDCKLTYIRKTNEWIFYWVYEAQKQIRETQADVHVVSIDPGVRTPFTWYSSTKGVGKIGEYDIGRIFRLXKHMDDLISQKDKLASSISKRKKKKALRVDKAIFRMKRKIKRLQXEIHRKTIKFLTDEFDMIIIPPFEVSGMINRKARKITRKTVXKMLCWSHYKFRQRLISKAEEKGIHVLIQNEAYTSKTCSRCGNIQNIGGSEIYKCKNCDIKIDRDVNGARGIFFRALLDGAMILS

SEQ ID NO: 3963 - protein, 627 aa, Gigaspora margarita
MFLTATQASSTLGVSSCTLRRWHRKGKIAAFHSPGGVRLYDVSNIVGSTTTTTTTSSSSSSSSSTPKSYVYARVSSSKQKADLERQQEFLLTKSPQHELVSDIGSGINFKRPGLRTILEQASRRMVAEVVVAHRDRLCRFAYDLIEYILKLNGAKLVVLSQDGSSNDETELCQDILAINTVFVCRMQGKRAARYRQERKKQQQKTQETIEINSPLKTPKEDRSNSIPKDQSVPEFLTENIVETMDGLVYNMVVANFNHGHLSTRQYWFRSLLKLKMLHEWNFMKGCPYEVLDHAITHAIQARDEVICRNNELNSDKHHLHFQRKKNNQQTITIRSKSCCKSGSLKFYVRSLHNNQITMSINRHKDNNPLFFPLHHEQRRKNHNWPNLEGKVKMDSKLMFNRKLGYWTFVWVYGKNVENCNDIQVAENLNIVAIDPGVRTGWSWYSPSKGCGWFGNLDINRVFRLSLFLDDLISRTTQAPPKKRNSMKRAQARLQCRIQNLVEECHKKVTLWFLTNFDVIIIPPFNGSAMSHRLNRKINSKTVRKMLTWSHSRFRKRLIFKAEELGKKVIIQNEAYTSKTCSCCGFIKHNLGGSKVFRCNECRVVIDRDFNGARGIFLRALLDGAVCI

SEQ ID NO: 3964 - protein, 465 aa, Gigaspora margarita
MVLFNESSSDEHEVSQDIFAINTVFKKILKRWLGLMRYAYNTVVRWNKNRRFCNSSKNFEWIKPYTLNEKLKLYTDIKEGKDLNEKDKKLRRSCVWGERKFLRTVVWLELRLKGLHDKVPANIIDESIDDALIARKNIIQKNLKDTKKSFLSFKSKKDLRQTMTIRAQNFSKKDWNYFYVMHLHNSLTLLSKRCKPNDFEGGKRDLCPFHFEKKRKHNKWPSQRIDCDCKLTYLHKTNEWIFYWVYKAQKQIRETQADVHVVSIDPGVRTPFTWYSSTKGAGKIGEYDIGRIFRLCKHMDDLISKKDRLASSISKRKKKKALRVDKAIFRMKRKIRRLQEEIHRKTIKFLTDEFDMIIIPSFEVSNMVNRKTRKITRKTVRKMLCWSHYKFRQRLISKAEEKGINVIIQNEAYTSKTCSWCGNIQNIGGSETYKCKNCNIKIDRDVNGARGIFLRALLDGAMILS

SEQ ID NO: 3965 - protein, 613 aa, Gigaspora margarita
MIPQPPPLPKRKVFYTHVPQVKKKTLKDRNRSLNPDSRIMSSSMMSVQVSTSKKTDLRPYWNNQVKEWSQKLWLPTMTDSADSHLTSLNLCSHYTLRNSWFSSTNQVPTNMKYHKISLQSTPSLSVEYKEEDQLCTEESGKPKTIKARSKKKRKIETTVNRTLSIKMYPNHSQKKILKRWLGLMRYAYNTVVRWNKNRRFCNSSKNFEWIKPYTLNEKLKLYTDIKEGKDLNEKDKKLRRSCVWGEXKFLRTVVWLELRLKGLHDKVPANIIDESIDDALIARKNIIQKNLKDTKKSFLSFKSKKDLRQTMTIRAQNFSKKDWNHFYVTHLHNSSTLLSKRCKPNDFEGGKRDLCPFHFEKKRKHNKWPSQRIDCDCKLTYLHKTNEWIFYWVYEAQKQIRETQXDVHVVSIDPGVRTLFTWYSSTKGAGKIGEYDIGRIFRLCKHMDDLISKKDRLASSISKRKKKKALRVDKAIFRMKRKIRXLQEEIHRKTIKFLTDEFDMIIIPSFEVSNMVNRKTXKITRKTVRKMLCWSHYKFRQRLISKAEEKGINVIIQNEAYTSKTCSWCGNIQNIGGSETYKCKNCNIKIDRDVNGARGIFLRALLDGAMILS

SEQ ID NO: 3966 - protein, 546 aa, Gigaspora margarita
MFLTATQASSTLGVSSCTLRRWHRKGKIAAFHSPGGVRLYDVSNIVGSTTTTTTSSSSSSTPKSYVYARVSSSKQKADLERQQEFILTKCPQHELVSDIGSGINFKRPGLRTILEQASRRMVAEVVVAHRDRLCRFAYDLIEYILKLNGAKLVVLSQDGSSNDETELCQDILAINTVFVCRMQGKRAARYRQERKKQQQKTQETIEINSPLKTPKEDRSNSIPKDQSVPEFLTENIVETIDGLVYNMVVANFNHGHLSTRQYWFRSLLKLKMLHEWNFMKGCPYEVLDHAITHAIQARDEVICRNNELNSDKHHLHFQRKKLLTLSFIIIAGKNVENCNDIQVAENLNIVAIDPGIRTGWSWYSPSKGCGWFGNLDINRVFRLSLFLDDLISRTTQAPPKKRNSMKRAQARLQRRIQNLVEECHKKVTLWFLTNFDVIIIPPFNGSAMSHRLNRKINSKTVRKMLTWSHSRFRKRLIFKAEELGKKVIIQNEAYTSKTCSCCGFIKHNLGGSKVFRCNECGVVIDRDFNGARGIFLRALLDGAVCI

SEQ ID NO: 3967 - protein, 628 aa, Gigaspora margarita
MFLTATQASSTLGVSSCTLRRWHRKGKIAAFHSPGGVRLYDVSNIVGSTTTTTTTSSSSSSSSSSTPKSYVYARVSSSKQKADLERQQEFLLTKCPQHELVSDIGSGINFKRPGLRTILEQASRRMVAEVVVAHRDRLCRFAYDLIEYILKLNGAKLVVLSQDGSSNDETELCQDILAINTVFVCRMQGKRAARYRQERKKQQQKTQETIEINSPLKTPKEDRSNSIPKDQSVPEFLTENIVETMDGLVYNMVVANFNHGHLSTRQYWFRSLLKLKMLHEWNFMKGCPYEVLDHAITHAIQARDEVICRNNELNSDKHHLHFQRKKNNQQTITIRSKSCCKSGSLKFYVRSLHNNQITMSINRHKDNNPLFFPLHHEQRRKNHNWPNLEGKVKMDSKLMFNRKLGYWTFVWVYGKNVENCNDIQVAENLNIVAIDPGVRTGWSWYSPSKGCGWFGNLDINRVFRLSLFLDDLISRTTQAPPKKRNSMKRAQARLQCRIQNLVEECHKKVTLWFLTNFDVIIIPPFNGSAMSHRLNRKINSKTVRKMLTWSHSRFRKRLIFKAEELGKKVIIQNEAYTSKTCSCCGFIKHNLGGSKVFRCNECRVVIDRDFNGARGIFLRALLDGAVCI

SEQ ID NO: 3968 - protein, 465 aa, Gigaspora margarita
MFLTATQASSTLGVSSCTLRRWHRKGKIAAFHSPGGVRLYDVSNIVGSTTTTTTSSSSSSSTPKSYVYARVSSSKQKADLERQQEFLLTKCPQHELVSDIGSGINFKRPGLRTILEQASRRMVAEVVVAHRDRLCRFAYDLIEYILKLNGAKLVVLSQDGSSNDETELCQDILAINTVFVCRMQGKRAARLVYNMVVANFNHGHLSTRQYWFRSLLKLKMLHEWNFMKGCPYEVLDHAITHAIQARDEVICRNNELNSDKHHLHFQRKKLLTLSFIIIAGKNVENCNDIQVAENLNIVAIDPGVRLGILHPRVVVAPPKKRNSMKRAQARLQCRIQNLVEECHKKVTLWFLTNFDVIIIPPFNGSAMSHRLNQKINSKTVHKMLTWSHSRFRKRLIFKAEELGKKVIIQNEAYTSKTCSCCGFIKHNLGGSKVFRCNECRVVIDRDFNGARGIFLRALLDGAVCI

SEQ ID NO: 3969 - protein, 626 aa, Gigaspora margarita
MFLTATQASSTLGVSSCTLRRWHRKGKIAAFHSPGGVRLYNVSNIVGSTTTTTTSSSSSSSSSTPKSYVYARVSSSKQKADLERQQEFLLTKCPQHELVSDIGSGINFKRPTLRTILEQASRRMVAEVVVAHRDRLCRFAYDLIEYILKLNGAKLVVLSQDGSSNDETELCQDILAINTVFVCRMQGKRAARYRQERKKQQQKMQETIEINSPLKTPKEDRSNSIPKDQSVPEFLTENIVETMDGLVYNMVVANFNHGHLSTRQYWFRSLLKLKMLHEWNFMKGCPYEVLDHAITHAIQAWDEVICRNNELNSDKHHLHFQRKKNNQQTITIRSKSCCKSGSLKFYVRSLHNNQITISINRHKDNNPLFFPLHHEQRRKNHNWPNLEGKVKMDSKLMFNRKLGYWTFVWVYGKNVENCNDIQVAENLNIVAIDPGVRTGWSWYSPSKGCGWFGNLDINRVFRLSLFLDDLISQTTQAPPKKRNSMKRAQARLQCRIQNLVEECHKKVTLWFLTNFDVIIIPPFNGSAMSHRLNQKINSKTVRKMLTWSHSRFRKRLIFKAEELGKKVIIQNEAYTSKTCSCCGFIKHNLGGSKVFRCNECRVVIDRDFNGARGIFLRALLDGAVCI

SEQ ID NO: 3970 - protein, 627 aa, Gigaspora margarita
MFLTATQASSTLGVSSCTLRRWHRKGKIAAFHSPGGVRLYDVSNIVGSTTTTTTSSSSSSSSSSTPKSYVYARVSSSKQKADLERQQEFLLTKCPQHELVSDIGSGINFKRPGLRTILEQASRRMVAEVVVAHRDRLCRFAYDLIEYILKLNGAKLVVLSQDGSSNDETELCQDILAINTVFVCRMQGKRAARYRQERKKQQQKTQETIEINSPLKTPKEDRSNSIPKDQSVPEFLTENIVETMDGLVYNMVVANFNHGHLSTRQYWFRSLLKLKMLHEWNFMKGCPYEVLDHAITHAIQARDEVICRNNELNSDKHHLHFQRKKNNQQTITIRSKSCCKSGSLKFYVRSLHNNQITMSINRHKDNNPLFFPLHHEQRRKNNNWPNLEGKVKMDSKLMFNRKLGYWTFVWVYGKNVENCNDIQVAENLNIVAIDPGVRTGWSWYSPSKGCGWFGNLDINRVFRLSLFLDDLISRTTQAPPKKRNSMKRAQARLQCRIQNLVEECHKKVTLWFLTNFDVIIIPPFNGSAMSHRLNRKINSKTVRKMLTWFHSRFRKRLIFKAEELGKKVIIQNEAYTSKTCSCCGFIKHNLGGSKVFRCNECRVVIDRDFNGARGIFLRALLDGAVCI

SEQ ID NO: 3971 - protein, 629 aa, Gigaspora margarita
MFLTATQASSTLGVSSCTLRXXXRKGKIAAFHSPGGVRLYDVSNIVGSTTTTTTTSSSSSSSSSSSTPKSYVYARVSSSKQKADLERQQEFLLTKCPQHELVSDIGSGINFKRPGLRTILEQASRRMAAEVVVAHRDRLCRFAYDLIEYILKLNGAKLVVLSQDGSSNDETELCQDILAINTVFVCRMQGKRAARYRQERKKQQQKTQETIEINSPLKTPKEDRSNSIPKDQSVPEFLTENIVETMDGLVYNMVVANFNHGHLSTRQYWFRSLLKLKMLHEWNFMKGCPYEVLDHAITHAIQARDEVICRNNELNSDKHHLHFQRKKNNQQTITIRSKSCCKSGSLKFYVRSLHNNQITMSINRHKDNNPLFFPLHHEQRRKNHNWPNLEGKVKMDSKLMFNRKLGYWTFVWVYGKNVENCNDIQVAENLNIVAIDPGVRTGWSWYSPSKGCGWFGNLDINRVFRLSLFLDDLISRTTQAPPKKRNSMKRAQARLQCRIQNLVEECHKKVTLWFLTNFDVIIIPPFNGSAMSHRLNRKINSKTVRKMLTWSHSRFRKRLIFKAEELGKKVIIQNEAYTSKTCSCCGFIKHNLGGSKVFRCNECRVVIDRDFNGARGIFLRALLDGAVCI

SEQ ID NO: 3972 - protein, 208 aa, Gigaspora margarita
MPYNIQDEAMNDLLKEYASNIAAKXSLSEQLGHDSCLVMNHLGKFYLCILVELEKQAKTQGSLFSKNQEKGESGVIALDPGVHTFMTNYDPSGIAIEWEKNNINQIYQLCHVYDRLQSKQDIIHGKENKHKCYRLWCVILDIHKRICYLVHECYXEYTNKTCEFCDNVYHKLGGSKVFYCPEYKTELDRDINGARNILLRYLTKKESV

SEQ ID NO: 3973 - protein, 573 aa, Gigaspora margarita
MIPPSPPLPLKNSYASQKQKRISNGKRKSYTKSIQAVNSSAISDQSNANVYKPKPYWNDRAKEWSEKLWLPIMNDYAGSPTNCSSTYSPSTLQNSWFSSTTRRPMNMSYPKISLPPIPSSPIECQEPSTEEKGKKRKKIFTVRKNKKRKQDEAVNRTLKVKLYPNLAQKRLLKQWMGLARLIYNTIIDYLQNRRILIVRADKKKNNRKDRIKFPKIQFLRTIVYLKLRSKKVYDDIPHNIITETVDEAVKNFNSKENKTKLKFKTRKDLKHTITIRAQNFSKKDWNRFFVTFLFNSSMRTPRKKPYDHKIYSRDLRALHFETKRKNNGWPLEKIDSDCKLTYFRKTNEWILSWVHERQKESKKIHERFVAIDPGVRTPFTTYSPSEGTCEIGKSDSQRLIRLAYHADKLNSKRDKLNSSSSKRKKKKAIRIDKAISRIFRKIKNLRNELHRKNVNYLIKNYDVVIIPEFGVKNMIKKEKRKINSKVVRSMLTWSHYLFRQRLKAKAEETGVEVIIQDEAYTSKTCSWCGNIQNIGGRKIYKCKNCNLIIDRDVNGARGIFLRALLDGAICMHM

SEQ ID NO: 3974 - protein, 976 aa, Gigaspora margarita
MFLTATQASSTLGVSSCTLRRWHRKGKIAAFHSPGGVRLYDVSNIMGSTTTTTTSSSSSSTPKSYVYARVSSSKQKADLERQQEFLLTKCPQHELVSDIGSGINFKRPGLRTILEQASRRMVAEVVVAHRDRLCRFAYDLIEYILKLNGAKLVVLSQDGSSNDETELCQDILAINTVFVCRMQGKRAARYRQERKKQQQKTQETIEINSPLKTPKEDRSNSIPKDQSVPEFLTENIVETMDGLVYNMVVANFNHGHLSTRQYWFRSLLKLKMLHEWNFMKGCPYEVLDHAITHAIQARDEVICRNNELNSDKHHLYFQRKKDNQQTITIRSKSCCKSGSLKFYVCSLHNNQITMSINRHKDNNPLFFPLHHEQRRKNHNWPNLEGKVKMDSKLMFNRKLGYWTFVWYMLLTLSFIIIAGKNVENCNDIQVAENLNIVAIDPGVRTGWSWYSPSKGCGWFGNLDINLVFRLSLFLDDLISRTTQAPPKKRNSMKRAQARLQRRIQNLVEECHKKVTLWFLTNFDVIIIPPFNGSAMSHRLNRKINSKTVHKMLTWSHSRFRKRLIFKAEELGKKVIIQNEAYTSKTCSCCGFIKHNLGGSKVFRCNEYGVVINRDFNGARGIFLRALLDGAVCSTKRNFEITIMILPLRRGRRRVRKTNQGSKKDSKENSEENSADGSNDDEDDEFIDDGTSDALKNQSFDDFTSVNEDNSNKDEFNNSDKVLFTKRLLHSFIIDPDDQYVQSGFTQEELKENIETTTSPQELQIEDDLLNYINTFAKDSTKDVREALYAPHPKFCREYDPFKDFAYEHVRTTVSDWVRLLEMQPNPLNLRDFPESWYRINVWRSLDIAFSDMRSVFFVGKKGDGYLREFGSTITDWAATEAGHKWDGEKGTKLLKECGLSLPKNLKDIFISLSRKINFCEEKIRKIRVPGFILSVVNGAFSNDNNVNRWKNSGRKPQEIIIPDCHQTPKKGKKGRS

SEQ ID NO: 3975 - protein, 629 aa, Gigaspora margarita
MFLTATQASSTLGVSSCTLRRWHRKGKIAAFHSPGGVRLYDVSNIVGSTTTTTSSSSSSSSSSTPKSYVYARVSSSKQKADLERQQEFLLTKCPQHELVSDIGSGINFKRPGLRTILEQASRRMVAEVVVAHRDRLCRFAYDLIEYILKLNGAKLVVLSQDGSSNDETELCQDILAINTVFVCRMQESEQQDIDKNEKNSSRKRKKPLKSTRRSKRQKKTDLTRSLKIRVYPNSSQKTLLKQWMGCARLVYNMVVANFNHGHLSTRQYWFRSLLKLKMLHEWNFMKGCPYEVLDHAITHAIQARDEVICRNNELNSDKHHLHFQRKKNNQQTITIRSKSCCKSGSLKFYVRSLHNNQITMSINRHKDNNPLFFPLHHEQRRKNHNWPNLEGKVKMDSKLMFNRKLGYWTFVWVYGKNVENCNDIQVAENLNIVAIDPGVRTGWSWYSPSKGCGWFGNLDINRVFRLSLFLDDLISRTTQAPPKKRNSMKRAQARLQCRIQNLVEECHKKVTLWFLTNFDVIIIPPFNGSAMSHRLNRKINSKTVRKMLTWSHSRFRKRLIFKAEELGKKVIIQNEAYTSKTCSCCGFIKHNLGGSKVFRCNECRVVIDRDFNGARGIFLRALLDGAVCI

SEQ ID NO: 3976 - protein, 626 aa, Gigaspora margarita
MFLTATQASSTLGVSSCTLRSWHRKGKIAAFHSPGGVRLYDVSNIVGSTTTTTTTSSSSSSSSTPKSYVYARVSSSKQKADLERQQEFLLTKCPQHELVSDIGSGINFKRPGLRTILEQASRRMVAEVVVAHRDRLCRFAYDLIEYILKLNGAKLVVLSQDGSSNDETELCQDILAINTVFVCRMQGKRAARYRQERKKQQQKMQETIEINSPLKTPKEDRSNSIPKDQSVPEFLTENIVETMDGLVYNMVVANFNHGHLSTRQYWFRSLLKLKMLHEWNFMKGCPYEVLDHAITHAIQARDEVICRNNELNSDKHHLHFQRKKNNQQTITIRSKSCCKSGSLKFYVRSLHNNQITMSINRHKDNNPLFFPLHHEQRRKNHNWPNLEGKVKMDSKLMFNRKLGYWTFVWVYGKNVENCNDIQVAENLNIVAIDPGVRTGWSWYSPSKGCGWFGNLDINRVFRLSLFLDDLISRTTQAPPKKRNSMKRAQARLQCRIQNLVEECHKKVTLWFLTNFDVIIIPPFNGSAMSHRLNRKINSKTVRKMLTWSHSRFRKRLIFKAEELGKKVIIQNEAYTSKTCSCCGFIKHNLGGSKVFRCNECRVVIDRDFNGARGIFLRALLDGAVCI

SEQ ID NO: 3977 - protein, 623 aa, Gigaspora margarita
MFLTATQASSTLGVSLCTLRRWHRKGKIAAFHSPGGVRLYDVSNIVGSTTTTTTTSSSSSTPKSYVYTRVSSSKQKADLERQQEFLLTKCPQHELVSDIGSGINFKRPGLRTILEQASRRMVAEVXVAHRDRLCRFAYDLIEYILKLNGAKLVVLSQDSSSNDETELCQDXLAINTVFVCRMQGKRAARYXQERKKXQQKTQETIEINSPLKXPKEDRSNSIPKDQSVPEFLTENIVETMDRLVYNMVVANFNHGHLSTRQYWFRSLLKLKMLHEWNFMKGCPYEVLDHAITHAIQARDEVICRNNELNSDKHHLHFQRKKNNQQTITIRSKSCCKSGSLKFYVRSLHNNQITMSINRHKDNNPLFFPLHHEQRRKNHNWPNLEEKVKMDSKLMFNRKLGYWTFVWVYGKNVENCNDIQVAENLSIVAIDPGVRTGWSWYSPSKGCGWFGNLDINRVFRLSLFLDDLISRTTQAPPKKQNSMKRAQARLQCHIQNLVEECHKKVTLWFLTNFDVIIIPPFNGSAMSHRLNRKINSKTVRKMLTWSHSRFRKRLIFKAEELGKKVIIQNEAYTSKTCSCCGFIKHNLGGSKVFRCNECRVVIDRDFNGARGIFLRALLDGAVCI

SEQ ID NO: 3978 - protein, 288 aa, Gigaspora margarita
MKFRSKKDPQQSIVIHSKHWGTSRGAFSFLHKMKSAESLSEQLGHDSRLVINRLGEFYLCIPVELEKRAENQGPLFSENQEKDGSGVIVLDPGVRTFMTGYDPSGMAIEWEKNDINRIYRLCHVYDRLQSKRNMIHGKGNKRKRYRLRRVMLRIHKRIRCLVHECHCKLTKWLCENYHIIILPEFRTQRMIRRGQRRIGSKTARAMCTWSHFCFRQHLAHKAREHPWCRIILCTEEYTSKTCRFCSNVYRKLGGSKVFRCPECKTELDRDINGARNILLRYLTKKESV

SEQ ID NO: 3979 - protein, 510 aa, Gigaspora margarita
MIPQPPPLPKRKVSYTHVSKVTNKRKTLKDRNRSLNPDSRIMGSSGQVSTSKEMDLRPYWNDQVKEWSQKLWLPTVTDSADSHLTSLNLCSYYTLQDSWFSSTNQVPTNMNYHKISLPSLSVEEEQLCTEESGKRKRSCVWGERKFLRTVAWLELRLKGLHDKVPANIIDESIDDALIARKNIVQKNLKETKKSSLSFKSKKDLRQTMNIRAQNFSKKDWNHFYVTHLHSSLTLLSKRCKSNKLESGKRDLRPFHFEKKRKHNKWPLQKIDCDCKLTYLRKTNEWIFHWVYEAQKHIRETQADVHVISIDPGVRTPFTWYSSTKGVGKIGEYDIGRIFRLCKHMDNLISKKDRLASSISKRKKKKALRVDKAIFRIKRKIKRLQDEVHRKTIKFLTDEFDMIIIPPFEVSNMVNRKSRKITRKTVRKMLCWSHYKFRQRLISKAEEKGIHVVIQNKAYTSKTCSWCGNIQNIGGSEMFNCKNCGIKIDRDVNGARGIFLRALLDGAMILS

SEQ ID NO: 3980 - protein, 529 aa, Gigaspora margarita
MIPQPPPLLKRKVSYTHVSQVTKKKKTFKDRNRSLNPDSRIISSSMMSGQVSTSKETGLRPYWNDQVKEWSQKLWLPTVTDSANSDLTSLNLCSYHTLQNSWFSSTNKVPTNMNYHKISLQSTPSLSVEHKKEKTKTIKARSKKKQKIETTVNRTLSIKMYPNHSQKKILKRWLGLMRYAYNTVVRRNKNRRFCNSSKHFEWIKPHTLNEKLKLYIDVKEGKDLNEKDKKLQRSCVWGERKFLRTVAWLELRLKGLHDKFFDFLSGKRDLRPFHFEKKRKHNKWPLQKIDCDCKLTYLRKTNEWIFHWVYEAQKQIRETQADVHVIAIDPGVRTPFTWYSSTKGVGKIGEYDIGRIFRLCKHMDNLISKKDRLTSSISKRKKKKALRVDKAIFRMKRKINQLRDEVHRKTIKFLTDEFDMIIIPPFEVSDMVNRKSRKITRKPVRKMLCWSHYKFRQRLISKAKEKGIHVVIQNEAYTSKTCSWCGNIQNIGGSEMYNCKNCGIKIDRDVNGARGIFLRALLDGAMILS

SEQ ID NO: 3981 - protein, 718 aa, Gigaspora margarita
MFLTATQASSTLGVSSCTLRRWHCKGKIAAFHSPGGVRLYDVSNIVGSTTTTTTTSSSSSSSTPKSYVYARGSSSKQKADLERQQEFLLTKCPQHELVSDIGSGINFKRPGLRTILEQASRRMVAEVVVAHRDRLCRFAYDLIEYILKLNGAKLVVLSQDGSSNDETELCQDILAINTVFVCRMQGKRAARYRQERKKQQQKTQETIEINSPLKTPKEDRSNSIPKDQSVPEFLTKNIVETMDGLVYNMVVANFNHGHLSTRQYWFRSLLKLKMLHEWNFMKGCPYEVLDHAITHAIQARDEVICRNNELNSDKHHLHFQRKKNNQQTITIRSKSCCKSGSLKFYVRSLHNNQITMSINRHKDNNPLFFPLHHEQRRKNHNWPNLEGKVKMDSKLMFNRKLGYWTFVWVYGTLRQHQSMQGGKNVENCNDIQVAENLNIVAIDPGVRTGWSWYSPSKGCGWFGNLDINRVFRLSLFLDDLISRTTQAPPKKRNSMKRAQARLRCRIQNLVEECHKKVTLWFLTNFDVIIIPPFNGSAMSHRLNRKINSKTVRKMLTWSHSRFRKRLIFKAEELGKKVIIQNEAYTSKTCSCCGFIKHNLGGSKVFRCNECRVVIDRDFNGARGIFLRALLDGAKELLNCKEESQRLNEMSMTLNDITNIFDADKVLTTKTTNGLSKCESCPEKGKNAIDELEICKSQLHFEEIQALAEIIRKNNTLAI

SEQ ID NO: 3982 - protein, 624 aa, Gigaspora margarita
MFLTATQASSTLGVSSCTLRRWHRKGKIAAFHSPGGVRLYDVSNIVGSTTTTTTSSSSSSSTPKSYVYARVSSSKQKADLERQQEFLLTKCPQHELVSDIGSGINFKRPGLRTILEQASRRMVAEVVVAHRDRLCRFAYDLIEYILKLNGAKLVVLSQDGSSNDETELCQDILAINTVFVCRMQGKRAARYRQERKKQQQKTQETIEINSPLKTPKEDRSNSIPKDQSVPEFLTENIVETMDGLVYNMVVANFNHGHLSTRQYWFRSFLKLKMLHEWNFMKGCPYEVLDHAITHAIQARDEVICRNNELNSDKHHLHFQRKKNNQQTITIRSKSCCKSGSLKFYVRSLHNNQITMSINRHKDNNPLFFPLHHEQRRKNHNWPNLEGKVKMDSKLMFNRKLGYWTFVWVYGKNVENCNDIQVAENLNIVAIDPGVRTGWSWYSPSKGCGWFGNLDINRVFRLSLFLDDLISRTTQAPPKKRNSMKRAQARLQCRIQNLVEECHKKVTLWFLTNFDVIIIPPFNGSAMSHRLNRKINSKTVHKMLTWSHSRFRKRLIFKAEELGKKVIIQNEAYTSKTCSCCGFIKHNLGGSKVFRCNECRVVIDRDFNGARGIFLRALLDGAVCI

SEQ ID NO: 3983 - protein, 542 aa, Gigaspora margarita
MIPQPPLLPKRNTHVSKVTNKRKTLKDRNRSLNPDSRIMSSSDQVSTSKEMDLRPYWNDQVKEWSQKLWLPTVTDSADSHLTSLNLCSHYTLQDSWFSSTNQKKILKRWLGLMRYAYNIVVRWNKNRRFCNSSKNFEWIKPHTLNEKLKLYIDVKEGKDLNEKDKKLQRSCVWGERKFLRTVAWLELRLKGLHDKVPANIIDESIDDALTARKNIIQKNLKETKKSSLSFKSKKDLRQTMTICMQNFSKKDWNHFYVTQLHSSLTLLSKRCKPNKLESGKRDLRPFHFEKKRKHNKWPLQKIDCDCKLTYLRKTNEWIFHWVYEAQKQIRETQADVHVIAIDPGVRTPFTWYSSTKGVGKIGEYDIGRIFRLCKHMDNLISKKDRLTSSISKRKKKKALRVDKAIFRIKRKIKRLRDEVHRKTIKFLTDEFDMIIIPPFKVSGMVNRKSRKITRKTVRKMLCWSHYKFRQRLISKAEEKGIHVVIQNEAYTSKTCSWCGNIQNIGGSEMYNCKNCGIKIDRDVNGARGIFLRTLLDGAMILS

SEQ ID NO: 3984 - protein, 598 aa, Gigaspora margarita
MIPQPPPLLKRKVSYTHVSQVTKKKKTFKDRNRSLNPDSRIISSSMMSGQVSTSKETGLRPYWNDQVKEWSQKLWLPTVTDSANSDLTSLNLCSYHTLQNSWFSSTNKVPTNMNYHKISLQSTPSLSVEHKKEKTKTIKAQSKKKQKIETTVNRTLSIKTYPNHSQKKILKRWLGLMRYAYNTVVRWNKNRRFCNSSKNFEWIKPHTLNEKLKLYIDVKEGKDLNEKDKKLQRSCVWGERKFLRTVAWLELCLKGLHDKVPANIIDESIDDALTARKNIIQKNLKETKKSSLSFKSKKDLWQTMTIRMQNFSKKDWNHFYVTQLHSSLTLLSKRCKPNKLESGKRDLRPFHFEKKRKHNKWPLQKIDCDCKLTYLRKTNEWIFHWIYEAQKQIRETQADVHVIAIDPGVRTPFTWYSSTKGVGKIGEYDIGRIFRLCKHMDNLISKKDRLTSSISKRKKKKALRVDKAIFRMKRKINQLRDEVHRKTIKFLTDEFDMIIIPPFEVSDMVNRKSRKITRKTVRKMLCWSHYKFRQRLISKAEEKGIHVVIQNEAYTSKTCSWCGNIQNIGGSEMYNCKNCGIKIDRCQWRPRDIPSGFA

SEQ ID NO: 3985 - protein, 537 aa, Gigaspora margarita
MIPQPPPLLKRKVSYTHVSQVTKKKKTFKDRNRSLNPDSRIINSSMMSGQVSTSKETGLRPYWNDQVKEWSQKLWLPTVTDSANSDLTLLNLCSYHTLQNSWFSSTNKVPTNMNYHKISLQSTPSLSVEHKKEKTKTIKARSKKKQKIETTVNRTLSIKTYPNHSQKKILKRWLGLMRYAYNTVVRWNKNRRFCNSSKNFEWIKPHTLNEKLKLYIDVKEGKDLNEKDKKLQRSCVWGERKFLRTVAWLELRFKGLHDKVPANIIDESIDDALKARKNIIQKNLKETKKSSLSFKSKKDLRQTMTIRMQNFSKKDWNHFYVTQLHSSLTLLSKRCKSNKLESGKRDLRPFHFEKKRKHNKWPLQKIDCDCKLTYLRKTNEWIFHWVYEAQKQIRETQADVHVIAIDPGVRTPFTWYSSTKGVGKIGEYDIGRIFRLCKHMDNLISKKDRLTSSISKRKKKKALRVDKAIFPEEKGIHVVIQNEAYTSKTCSWCGNIQNIGGSEMYNCKNCGIKIDRDVNGARGIFLRALLDGAMILS

SEQ ID NO: 3986 - protein, 708 aa, Zostera nigricaulis
MTSCPSRPSERSIIYQEPPSCLGKRKDRSRLSRLQADIDDTKSTRFLEELLIKKGERLPTAESALRSRKRICLARKTSCKKDTRNTKSSRTSAPASTSSENRSVKWFNSYCKDLSKSLWYPTETDSAESPLASLSGCVRSTTRNSWSKTTTFDLPKKSLPTTFSPSYTSSVAEGMGSEGTEPRMVTKATKVKILPDKEQEKILRGWFRDARKIYNRVIHLMRTSDDLKITKYNIRNEVSTPATSEFKGTPSKILHQAAFDAYEAYDSNMKKLKIAIKEKKSFGKKKRKKKKKKKAQNEEKVKPKRQRHNRRNKARRQKERARKQNGSLANKPFRLKFKSSRRNRDSIGFQACGVSIINETMVTLFPKTMKDPLRISKYTGDASQSPRICRAYGRYYFCFPEEVESRPPHEGVNREVAIDPGVRKFMAYYSPSGTAGFIGQGANVQSSVKGSRGFVRKTLQHIKNTTGYCGYNCDLHIGERKKKTIGTGMYRQMDIYFSRYNQMRKDMRDLDDMYASFSVQEKCTTRKWYRKKKYSLRKAWHRLMSKASSRMEDFHWKSAQFLLENFDTVYIPKFQVQNMTRKGNLSVKTRKRMLYQRHFSFRQKLKHRANILGKTVIEGSEWGTTKCCGVCGLRNEPGSAEVYSCSGCSVRNVERDLHGARNYYIKEKSRIQDCVDKEVYNFVKSEIRSVVDATLNSICSGTAVTVRK

SEQ ID NO: 3987 - protein, 383 aa, Nymphicus hollandicus
MIKAQVVELKPNKTMQQELDKLCDYRRYCWNQALATWQDMYEARTLDKDNNPSPNERRIRDELVDNKADWQFALSARCLQLAVKDLANAWKNFFDKAQPDWGKPHFKSKKAPRQGFKTDRAKVVNGKLRLDKPRGIKTWFDIPTYEALKMKQIKVASVFRERGHYYAALSYEEETLVKPRTGRKTAVDVNVGHFNYTGGKINVLPSRLQKLYKRIKHYQRMLAKKRRANGKLAGQSNNYVQVRTKLQRDYRKVANIQNDLLQKFTTKLVNNYDQIVIEDLAVKQMMMTHVASKGMQRSLFSKFRQILTYKCEWYGKELILADKTYPSTQRCANCGYVKKGDEKITLQGNQKHHTKHNEYICYECGYTNDRDDNAVLNLLALAK

SEQ ID NO: 3988 - protein, 358 aa, Nymphicus hollandicus
MLDMQIERRKNNPEAKYINGFGMNNLLKRLKQEHPWLKKAESTALQSASRDLDDAFQRFFKGQNDFPRFKSKKYAQSYTSKQVNNNIMVLNNHHIKLPKLGSMYFRAGRLPEGKIKRVTVRQNSAGQYYISILTESENQTLPKTGKQIGGDLGLKALLNLSNGEKIPNHHFNDKLSKKIHHWERLRSRRCLEAKKQIAWDKHNHVLEPRRLSDFKNYRKACRMVAKYKMKVANQQLDQLQKLTTKLVRENDVIVLEKLNVKGMMKNHHLARAIGGVSWSKLVDILQYKCDWYGKKLIQIDPSYTSQICAECGERNNRLGLGKAEWLAVREWDCPHCGSHLDRDINAAKVILKHGLVAQ

SEQ ID NO: 3989 - protein, 396 aa, Neopyropia yezoensis
MRTGDDGKHLQATLEWAARRDTAAYGQRFGAQATRHLRTARVRRAIQRGRFAASVARDLTGGLLRQVRGGGAVVVAMGTARVRRGEAWLRRHLRRLCWFVDQDEFNTSQACSECHDKMVLIYPTGNSPPKIPRELNGPPAGPLPSTRRVRMAAGSRRGRPKRALPSATHVTRRGPDPDAYRAAVRATARAAAVARRAAALAACAVEDRAVYADPRRLSEWAAKGCYTCSLAAPQGPGHPAPHPPVIRNRDDVAACNMAWVAARRLTGTNVWPFKRPFGMRWAWTTKRPPSGVPVPPVRRTRATARVDVWPVLAAVDTVFDGGGGGGGGGGGGGGGGGGGGGRGVVDGDATAASCTTRRGAPGGEQVAAAGSAMDGVRRAETGATGAPRGLVDTARR

SEQ ID NO: 3990 - protein, 327 aa, Neopyropia yezoensis
MGTARVRGGGAWLRRHLRRLCWFVDQDEFNTSKACSECHDKMVLIYSTGNSPPKISRELYGPPAGPLPSTRRVRMAAGSRRGRPKQALPSATHVTRRGPDPDAYQAAVRATARAAAVARRAAALAACAVEDRAVYADPRRLSEWAAKGCYTCSLAAPQGPGHPAPHPPVIRNRDDVAARNMAWVAARRLPGTNVWPFDRPIGMRWAWTTKRPPSGVPVPPVRRTRATTRVDVWPALAAVDTVVDGGGGGGGGGGGGGGGRGVVDGGGGGGGGRGVGDGDATAAACTTRRGAPGGERVAAAGSAMDGVRRAETGATDAPRGLVDTARR

SEQ ID NO: 3991 - protein, 336 aa, Neopyropia yezoensis
MGTERVRGGDAWLRRHLRRLCWFVDQDEFNTSKACSECHDKMVLIYSTGNSSPKIPRELYGPPAGPLPSTRRVRMAAGSRRGRPKRALPSATHVTRRGPDPDAYRAAVRATARAAAVARRAAALAACAVEDRAVYADPRRLSEWAAKGCYTCSLAAPQGPGHPAPHPPVIRNRDDVAARNMAWVAARRLTGTNVWPFKRPFGMRWAWMNKRPPRGVPVPPVRRTRAITRVDVWPVLAAVDTVGDGGGGGGGGGGGGGGGGGGGGGGGGGGGGGGGGGGGGGRGVADGDATAASCTTRRGAPGGERVAAAGSAMDGVRRAETGATDAPRGLVDTARR

SEQ ID NO: 3992 - protein, 390 aa, Neopyropia yezoensis
MRTGDDGKHLQATLEWAARRDTAAYGQRFGAQATRHLRVARVRKAIQRGRFAASVARDLTGGLLRQVRGGGAGVVAMGTARVRGGDAWLRRHLRRLCWLVDQDEFNTSQACSECHDKMVLIYSTGNSPPKIPRELNGPPAGPLPSTRRVRMAAGSRRGRPKRALPSATHVTRRGPDPDAYRAAVRATARAAAVARRAAALAACAVEDRAVYADPRRLSEWAAKGCYTCSLAAPQGPGHPAPHPPVIRNRDDVAARNMAWVAARRLTGTNVWPFKRPFGMRWAWTTKRPPSGVPVPPVRRTRAITRVDVWPVLAAVDTVGDGGGGGGGGGGGGGGGREVVDGDATAASCTTRRSAPGGERVAAAGSTMDGVRRAETGATDAPRGLVDTARR

SEQ ID NO: 3993 - protein, 386 aa, Neopyropia yezoensis
MERAQASWRAVWEASRPVCSKATPEDLFEGTCLKQPTMLDLAAAALTWASFHSTAEYAGAYGKDSLRPLRKARVHRLVQRGRFAAKVARNVGGGFGRRIVDGKAVLVVWGAAATRGGAGALRRRVALGCFLATQDEYNSSQTCADCHCRLVLVYPTDLSPDDRRPVINVAQCAAQARGDADSNKRKVVESQRRAAKGRCGCDGRGRCSPRDVTGRGRAEERDAGEARGRLAEISVSGKRSGGYDVLACWSVKKCVNPDCCRLYFNRDKNAARHIVQVAVSSLLGRSTFPFFRNCHPRWPRAATAQWSRDTTSEWHPPWLVSNSAGGGVGGGGGGGGGGEGGGGTTNPVRATTKLVSVRALDGATAFSRTATSPAGDGGGNCRTVHQ

SEQ ID NO: 3994 - protein, 392 aa, Neopyropia yezoensis
MRTGDGAKHLQATLEWAARRDTAAYGQRFGAQATRHLRTARVRKAIQRGRFAASVARDLTGGLLRQVRGGGAVVVAMGTARVRGGDAWLRRHLRRLCWFVDQDEFNTSQACSECHDKMVLIYSTGNSPPKIPRDLYGPPAGSLPSTRRVRMAAGSRRGRPKRALPSATHVTRRGPDPDAYREAVRATARAAAVARRAAALAACAVEDRAVYADPRRLSEWAAKGCYTCSLAAPQGPGHPAPHPPVIRNRDDVTARNIAWVAARHLTGTNVWPFKRPFGMRWAWTTKRPPSGVPVPPVRRTRATTRVDVWPVLAAVDTVVDGGGSGGGGGGGGGGGGGRGVVDGDATAASCATRRGAPGGEQVAAAGSAMDGVRRAQTGATDAPRGLVDTARR

SEQ ID NO: 3995 - protein, 410 aa, Neopyropia yezoensis
MRTGDDGKHLQATLEWAARRDTAAYGHRFGAQATRHLRAARVRKATQRGRFAASVERDLTGGLLRQVRGGGAVVVAMGTARVCGGDAWLRRHLRRLCWFVDQDEFNTSKACSECHDKMVLIYSTGNSPPKIPRELYGPPAGPLPSTRRVRMAAGSRRGRPERALPSATHVTRRGPDPDAYRAAVRATARAAAVARRAAALAACAVEDRAVYADPRRLSEWAAKGCYTCSLAAPQGPGHPAPHPPVIRNRDDVAARNMAWVAARRLTGTDVWPFKRPFGMRWAWTTKRPPSGVPVPPVRRTRATTRVDVWPVLAAVDTVGDGGGGGGGGGGGGGGGGGGGGGGGGGGGGGGGGGGGRGVVDGDATAASCTTRRGASGGERVAAAGSAMDGVRRAETGATDAPRGLVDTARR

SEQ ID NO: 3996 - protein, 561 aa, Neopyropia yezoensis
MASPGGGHGRVRRGPQASIRRARRTQLATSVRRVLRHTRLSRWTVPRHEAEKVARWLVDPTAAAGNSARRTTPDAPVQDRVHALPRRKGCRRLAPVHGLRYSLSAAHFREASGGTFLARAWKQWRARSGTEAGPVAASVAGLVAAAGDVGGVARHPPPVDLAAAHGTMRTGDDGKHLQATLEWAARRDTAAYGQRFGAKATRHLRTARVRKAIQRGRFAASVARDLTGGLLRQVRGGGAVVVAMVIQRVRGGDAWLRRHLRRLCWFVDHDEFNTSQACSECHDKMVLIYSTGNSPPKIPGELYGPPAGPLPSTRRVRMAAGSRRGRPKRASPSATHVTRRGPDPDAYRAAVRATARAAAVARHAAALAACAVEDRAIYADARRLSEWAAKGCYTCSLAAPQGPGHPAPHPPVIRNRDDVAARNMAWVAALRLTGTNVWPFKRPFGMRWAWTTKRPPSGVPVPPIRRTRATTRVDVWPVLATVDTVGDGGGGGGGGGGGGGGGGGGGRGVVDGDATAASCTTRRGAPGGERVAAAGSSMDGVRRAETGATDAPRGLVDTALR

SEQ ID NO: 3997 - protein, 365 aa, Neopyropia yezoensis
MGTARVRGGDAWLRRHLRRLCWFVDQDEFNTSKACSECHDKMVLIYSTGNPPPKIPRELYGPPAGPLPSTRRVRMAAGSRRGRPKRALPSATHVTRRGPDPDGYREAVRATARAAAVARRAAALAACAVEDRAVYADPRRLSEWAAKGCYTCSLAAPQGPGHPAPHPPVIRNRDDVAARNIAWVAARRLTGTNVWPFKRPFGMRWAWTTKRPPSGVPVPPVRRTRATTRVDVWPVLAAVDTVVDGGGGGGGGGGGGSGGGGRGVVDGDATAASCTTRRGAPGGEQVAAAGSAMDGVRRAETGATDAPRGLVDTAKRQDSAHLARDPHLPRGASAAPFFADEPIMGNCRPFTSRLDAGFSRGPFPG

SEQ ID NO: 3998 - protein, 290 aa, Neopyropia yezoensis
MGTARVRGGDGWLRRHLRRLCWFVDQDEFNTSQACSECHDKMVLIYPTGNSPPKIPRELNGPPAGPLPSTRRVRMAAGSRRGRPKRALPSATHVTRRGPDPDAYREAVRATARAAAVARRAAVLAACAVEDRAVYADPRRLSEWAAKGCYTCSLAAPQGPGHPAPHPPVIRNRDDVAARNIAWVAARRLTGTNVWPFKRPFGMRWAWTTKRPPSGVPVPPVRRTRATTRVDVWPVLAAVDTVVDGGGGGGGGGGGGGRGVAAAGSAMDGVRRAETGATGAPRGLVDTARR

SEQ ID NO: 3999 - protein, 316 aa, Neopyropia yezoensis
MGTARVRGGDAWLRRHLRRLCWFVDQDEFNTSQACSECHDKMVLIYPTGNSPPKIPRELYGPPAGPLPSTRRVRMAAGSRRGRPKRALPSATHVTRRGPDPDAYREAVRATARAAAVARRAAALAACAVEDRAVYADPRRLSEWAAKGCYTCSLAAPQGPGHPAPHPPVIRNRDDVAARNIAWVAARRLTGTNVWPFKRPFGMRWAWTTKRPPSGVPVPPVRRTRATTRVDVWPVLAAVDTVVDGGGGGGGGGGGGGGGGGRGVVDGDATAASCTTRRGAPGGEQVAAAGSAMDGVRRAEAGATDAPRGLVDTARR

SEQ ID NO: 4000 - protein, 597 aa, Neopyropia yezoensis
MRQARRSSPEGSDDDAAAVAPAAAGATTPPEAKTFQTASPGGGHGRVRRGPQASIRRARRTQLATSVRRVLRRTRLSRWTVPRHEAEKVARWLVDPTAAAGDSDSGTTPDAPLLDRVDALPRRKGCRRLAPVPGLRYSLSAAHFREASGGNFLARAWKQWRARSGTGAGPVAAAAVAGLVAAAAGDGGGVAGHLPPVDLAAAHGTMRTGDDGKHLQATLEWAARRDTAAYGQRFGAQATRHLRAARVRKAIQRGRFAASVARDLTGGLLRQVRGGGAVVVAMGTARVRGGDAWLRRHLRRLCWLVDQDEFNTSQACSECHDKMVLIYSTGNSPPKIPRELYGPPAGPLPSTRRVRMAAGSRRGRPKRALPSATHVTRRGPDPDAYREAVRATARAAAVARRAAALAACAVEDRAVYADPRRLSEWAAKGCYTCSLAAPQGPGHPAPHPPVIRNRDDVAARNIAWVAARRLTGTNVRPFKRPFGMRWAWTTKRPPSGVPVPPVRRTRATTRVDVWPVLAAVDTVVDGGGGGGGGGGGGGGGGGRGVVDGDATAASCTTRRGAPGGEQVAAAGSAMDGVRRAETGATDAPRGLVDTARR

SEQ ID NO: 4001 - protein, 390 aa, Neopyropia yezoensis
MRTGDGGKHLQATLEWAARRDTAAYGQRFGAQATRHLRAACVRKAIQRGRFAASVAQDLTGGLLRQVRGGGAVVVAMGTARVRGGDAWLRRHLRRLCWFVDQDEFNTSKACSECHDKMVLIYSTGNSPPKIPRQLYGPPAGPLPSTRRVRMAAGSRRGRPKRALPSATHVTRRGPDPDAYRAAVRATARAAAVARRAAALAACAVEDRAVYADPRRLSEWVAKGCYTCCLAAPQGPGHPAPHPPVIRNRDDVAARNMAWVAARRLTGTNVWPFKRPFDMRWAWTTKRPPSGVPVPPVRCTRAITRVDVWPVLAAVDTVGDGGGGGGGGGGGGGGGREVVDGDATAASCTTRRGAPGGERVAAAGSTMDGVRRAETGATDAPRGLVDTARR

SEQ ID NO: 4002 - protein, 398 aa, Neopyropia yezoensis
MRTGDDGKNLQATLEWAARRDTAAYGQRFGAQATRHLRTARVRKAIQRGRFAASVARDLTGGLLRQVRGGGAVVVAMGTARVRGGDAWLRRHLRRLCWLVDQDEFNTSQACSECHDKMVLIYSTGNSPPKIPGELYGPPAGPLPSTRRVRMAAGSRRGRPKRALPSATHVTRRGTDPDAYRAAVRATARAAAVARRAAALAACAVEDRAVYADPRRLSEWAAKGCYTCSLAAPQGPGHPAPHPPVIRNRDDVAARNMAWVAARRLTGTDVWPFKRPFGMRWAWTTKRPPSGVPVPPVRRTRATTRVDVWPVLAAVDTVVDGGGGGGGGGGGGGGGGGGGGGGGRGVVDGDATAASCTTRRGAPGGERVAAAGSAMDGVRRAETGATDAPRGLVDTARR

SEQ ID NO: 4003 - protein, 316 aa, Neopyropia yezoensis
MGTARVRGGDAWLRRHLRRLCWFVDQDEFNTSQACSECHDKMVLIYPTGNSPPKIPRELNGPPAGPLPSTRRVRMAAGSRRGRPKRALPSATHVTRRGPDPDAYRAAVRATARAAAVAWRAAALAACAVEDRAVYADPRRLSEWVAKGCYTCSLAAPQGPGHPAPHPPVIRNRDDVAARNIAWVAARRLTGTNVWPFKRPFGMRWAWTTKRPPSGVPVPPVRRTRATSRVDVWPVLAAVDTVVDGGGGGGGGGGGGGGGGGRGVVDGDATAASCTTRRGAPGGEQVAAAGSAMDGVRRAETGATGAPRGLVDTARR

SEQ ID NO: 4004 - protein, 321 aa, Neopyropia yezoensis
MGTARVRGGDAWLRRHLRRLCWFVDQDEFNTSQACSECHDKMVLIYPTGNSPPKIPRELNGPPAGPLPSTRRVRMAAGSRRGRPKRALPSATHVTRRGPDPDAYREAVRATARAAAVARRAAALAACAVEDRAVYADPRRLSEWAAKGCYTCSLAAPQGPGHPAPHPPVIRNRDDVAARNMAWVAARRLTGTNVWPFKRPFGMRWAWTTKRPPSGVPVPPVRRTRATTRVDVWPVLAAVDTVGDGGGGGGGGGGGGGGGGGGGGGGRGVVDGDATAASCTTRRGAPGGEQVAAAGSAMDGVRRAATGAADAPGGLVDTARR

SEQ ID NO: 4005 - protein, 394 aa, Neopyropia yezoensis
MRTGDDGKHLQATLEWAARRDTAAYGQRLGAQATRHLRTARVRKAIERGRFAASVARDLTGGLLRQVRGGGAVVVAMGTARVRGGDAWLRRHLRRLCWFVDQDEFNTSQACSECHDKMVLIYSTGNSPPKIPRELYGPPAGPLPSTRRVWMAAGSRRGRPKRALPSATHVTRRGPDPDAYRVAVRATARAAAVARRAAALAACAVEDRAVYADPRRLSEWAAKGCYTCSLAAPQGPGHPAPHPPVIRNRDDVAARNMAWVAARRRTGTNVWPFRRPFGMRWAWTAKRPPSGVPVPPVRRTRATTRVDVWPVLAAVDTVGDGRGGGGGGGGGGGGGGGGGRGVVDGDATAPSSVMRRGAPGGERVAAAGSAMDGVRRAEAGATDAPRGLVDTARR

SEQ ID NO: 4006 - protein, 394 aa, Neopyropia yezoensis
MRTGDDGKHLQATLEWAARRDTAAYGQQFGAQATRHLRTARMHKAIQRGHFAASVARDLTGGLLRQVRGGGAVVVAMGTARVRGGDAWLRSHLRRLCWFFDQDEFNTSQACSECHDKMVLIYPTGNPPPKIPRELNGPPAGPLPSTRRVRMAAGSRRGRPKRALPSATHVTRRGPDPDAYREAVRATARAAAVAQSAAALAACAVEDRAVYADPRRLSEWAAKGCYTCSLAAPQGPGHPAPHPPVIRNRDDVAARNMAWVAARRLTGTNVWPFKRPFGMRWAWTTKRPPSGVPVPPVRRTRATTRVDVWPVLAAVDTVVDGGGVGGGGGGGGGGGGGGGRSVVDGDATAASCTTRRGGPGGERVAGAGSSMDGVRRAETGARDAFRGLVNTARR

SEQ ID NO: 4007 - protein, 390 aa, Neopyropia yezoensis
MRTGDDGKHLQATLEWAARRDTAAYGQRFGAQATRHLRAARVRKAIQRGRFAASVARDLTGGLLRQVRGGGAVVVAMGTERVRGGDAWLRRHLRRLCWFVDQDEFNTSQACSECHDKMVLIYSTGNSPPKIPRELYGPPAGPLPSTRRVRMAAGSRRGRPKRALPSATHVTRRGPDPDAYREAVRATARAAAVARRAAALAACAVEDRAVYADPRRLSEWAAKGCYTCSLAAPQGPGHPAPHPPVIRNRDDVAARNIAWVAARRLTGTNVWPFKRPFGMRWAWTTKRPPSGVPVPPVRRTRATTRVDVWPVLAAVDTVVDGGGGGGGGGGGGGGGRGVVDGDATAASCTTRRGAPGGEQVAAAGSAMDGVRRAETGATDAPRGLVDTARR

SEQ ID NO: 4008 - protein, 389 aa, Taenaris catops
MIRAMRYRSYVYALQPTNHQNLLFEQYAGVCRLIWNVALDQRRNHWRNFQRSTGNSVTYASQVRELTNLRTEFAFMREVPCATQQFVLRQLDRAFKRFFEGSTAIPGFRSKSCSNSFTFDRNIHVKKINKRWGKVKLPKIGWVKFRLTRPIKGKICQATVSKTPLGWQISIGCKFEEDVVDNGLTAGIDRGVAVPIALSDGTSYSLPEQIEKYERAARRAQKVASRRKRGSKRHAKAQQRVRSLKARQARVRKHWAHEATTDITRRYSGVVIEALKTKNMTKSGPHKRGLNRSILNVGWHQIETMLAYKAARLVKVNPAYTSQTCSDCGTVDSQSRKSQASFVCTACGHRDNADTNAAKVILIRGSTPGVEVSRRTAAEARTHQTALAA

SEQ ID NO: 4009 - protein, 367 aa, Actias luna
MKTLKLRIRDKHTDQLSRLSGSVNFVWNYINALSYEHLKRTGKFFSGYDLSEYTKGSGELLGLHSQTIQAINETYAKSRKQFKKAKLNWRTNNPKAKRKSLCWLPFKQSAIKHIATHATGKKGLKSTLQLSLAKGQKLIIDLWDSYNLSLYQINTCELVQDSRNRWYACITVKDYPKPSCGTGSVGIDLGLKDSATASNGDKLQIKQTQAWAKKLGIAQRAKNKQRVKAIHTKIKNTRQDLIHKFTTQLVKDNALIVVGDIKTTQFNSKKGKLAKSVYDAGWFELKRQLTYKCENAGCRFEIVNEKYTTQTCSYCGDMSSSPKGRADLRIREWTCAKCGTRHDRDINASKNILAVGLDRLVEEIPSL

SEQ ID NO: 4010 - protein, 434 aa, Actias luna
MKINKAYKFRLEPNAEQEVVLNNLVGSARFVWNQILALSFDMFAKNEFINATNLVNKIMDIKANPDFAFLKESSNAVSLQQKIRDLASAWSRFFDPKTHARLKENKKKPRKAKFFTLADGTEIQLRPLMPRFKRKSDGYDSIRLVQFDKYCKVQGNRVKLPNGVGLVKFRKSQDTLGTIKNVTISKKSGHWYVSFGTEREVETPRHPAKTAIGIDLGITKFITTSNGEVIQPKNSFKTNQVKLAKLQRQLSRKVLFSQNWKKHNRKIQKLHHHITNVRHDYLHKITTSISKSHAMIACEDLKVANMSRSASGSMDKKGRNVKAKSGLNKSILDQGWSMALDMLEYKQNWLGGILIKVNPRLTSQTCFECKHVAVDNRRTQAKFECVQCGHTANADVNAAKNILAAGHAVLSVEERGSKDLPLTQKTCDLREKVA

SEQ ID NO: 4011 - protein, 303 aa, Actias luna
MYLRFFSLCEAVKWRWENRSGDFFFSIDFLRLSSFTNNPKAKRRSLGWIPFKKTAIKHISTRQSGRKSLKSTLQFSLAKGKKLTIDLWDSYNLSLYSINTCELVQDNSGHWYACVTVKEFPKTACGTGQVGVDLGCKESAVTSNGNVLTTKLTHKYAERLAIAQRAKHKKRVKAIHAKIKNTRLDLIHKFTSKLVKANNLIVIGKIKSTSFTSTKLAKSVYDAGWFEIKRQLDYKCKNAGCHYIEVNEAYTTQTCSCCGSRQDSPRGRAGLGVRVWFCSSCQTVHQRDVNGAKNILAVGLDRL

SEQ ID NO: 4012 - protein, 382 aa, Actias luna
MTKQILKAHKVRLYPNEEQQIFFAKSFGCTRFIWNRMLSDKIDHYNEHKTELKNTPAQYKKEFEWLKEVDSLALANVQQNLRAAYSKFFKGLGFPKFKKKGQRDSYTTNNQKGTVAITDSTVKLPKIGHIIAKFPSKVNGLIKSATISKTPSGKYYVSLLVETIATTLPKTHSNIGIDLGLTDFIVLSDGSKVANPKFLSKLQHKLAREQKILAKRRAVAKADQRKLSDSRNYQKQKVKVAKVYEKITNIRKDFLHKLSFNLIKNHDVIAIEDLNVKGMVKNRKLSKAISDSSWSTFTTMLNYKAEWYGKALIKVDRWYPSSKTCSGCGHLLTKAELPLQVRSWNCPSCLQSNDRDINASINILNEGLKLATIKTVGTTGLA

SEQ ID NO: 4013 - protein, 358 aa, Actias luna
MKTLKLRIKDKHAQQLNKLAGSVNFVWNYVNELSFKHLQRTGKFFSAYDVAAYTKGSGELLNLHSQTLQAITETHTKSRKQFKKTKLKWRTNNPKAKRKSLGWIPFKKTAIKHLATRQTGKKSLKTTIQLSLAKGKKLTIDVWDSYNLALYSINTCELVQDARGNWYACVTVKEFPKLVCGQGKAGIDLGCKDAAVSSDGDKLQTKITHKYAKKLAIAQRAKNKKRVRAIHTKIKNTRKDLTHKFTSKLVKANNLIVVGKIKSKSFTSSKLAKSVYDAGWFEIKRQLTYKCKHAGCHYVEVNEAYTTQTCSCCGSRQDSPKGRKGLGVREWFCSSCKTVHQRDVNGAKNILAVGLDRL

SEQ ID NO: 4014 - protein, 400 aa, Actias luna
MLAMSFEMFANNEFINATNLVNKIMDLKNNPDFEFLKSHSNAVSLQQKVRDLASAWSRFFDPKVHARLKENKKKIRKPKFFKLADGTEIQLRPLMPRFKRKSDGCDSIRLVQFDKYCRIEGNRVKLPNGIGLVKFRKSQDIIGTIKNVTISKKSGHWSVSFGCEREIENPIHPSKSAIGIDLGITRLISTSDGQYIKPKNSFKSNQVKLAKLQRQLSRKVLFSQNWQKQNRKIQKLHHHIANIRHDYLHKITTNISKNHAMIVVEDLKVVNMSKSASGSAVQHGRNVKAKSGLNKSILDQGWGMMVDMIEYKQHWQGGLLIKINPRYTSQTCFECKHIAKENRRSQARFECVKCRYVANADFNAARNILAAGHAVLSAEGGCGKGRPMKQKTCGLREKAT

SEQ ID NO: 4015 - protein, 331 aa, Actias luna
MPKQILKAHKVRLYPNEEQQIFFAKSFGCTRFIWNRMLSDKIDHYNEHKTELKNTPAQYKKEFEWLKEVDSLALANVQQNLRAAYNKFFKQGARFPKFKKKGQHDSYTTNNQKGTVAVTKNTVKLPKIGHIKARFPSRINGLIKSATISHTPSGKYFVSLLVETIVNELPKTHSNIGIDLGLTDFIVLSDGSKVANPKFLSKLQDKLAREQKILAKRRAVAKADQRKLSESRNYQKQKTKVAKVYEKITNTRKDFLHKLSFNLIKNHDVIAIEDLNVKGMVKNHKLAKAISDSSWSSFTTMLAYKADWYGKTLVKIDRWFPSSKTCSNCNQ

SEQ ID NO: 4016 - protein, 319 aa, Actias luna
MAEVDSLALANVQQNLRAAYSKFFKQGAGFPKFKKKGIKDSYTTNNQKGSVAVTKNTVKLPKIGHIKVKIHQSVNGLIKSATISRTPSGKYYVSLLIETIVNELPKTHSNIGIDLGLTDFIVLSDGSKVANPKFLSKLQAKLAREQKILAKRRAAAKADQRKLSESRNYQKQRIKVAKVYEQITNSRKDFLHKLSFNLIKNHDVIAIEDLNIKGMVKNRKLAKAISDSSWSAFTTMLTYKADWYGKALVKIDRWYPSSKTCSNCDHLLNKAELPLSVRTWDCPSCLQKNDRDINASINILNQGLLLAKQSKTVGATGLA

SEQ ID NO: 4017 - protein, 282 aa, Actias luna
MTKSYDTRCLLLVVVASSSPTSLGHIVTSHQMDHINVLDEVLRMLLEIINSCLSHQLVNNLNLVYALLHKRHVFQHHQNHHITQNIDMVKLAKLQRQLSRKVMFSQNWKKQNSKIQKLHHHIANIRHDYLHKITTTISKNHAMIACEDLKVANMSKSASGSMEKKGKNVKAKSGLNKSILDQGWGMMIDMLEYKQQWRGGLLVKVNPRYTSQTCSECQHIAKENRQSQSKFECVKCMYVANADVNAARNILAAGHAVLSAEGRCGKGRPMKQKTCNPREKVA

SEQ ID NO: 4018 - protein, 477 aa, Actias luna
MVKKIVLQTDFGLEDGAVSAMYALAFSVDSSLGIYNLTHAIPQYNIWEASYRLYQTVNYWPQETVFVSVVDPGVGTERLSVVARTADNHYIVTPNNGTLTHLQESIGIVELRQIDETVNRLPNSGESYTFHGRDVYVYTAARLAAGVISFDEVGPLCNLNQLVVVPQQQSELVQDFICLNMDMFVSLFMLTRLIGGNRVITLGTAIEQHFLVTQNWGFTSVLLSHVAFSIPIVVLMVLPKLQEMNDTMIKAARDLGANTWQVLTKVILPSITPGLTNFIVLSDSTKVANPRFLSKLKDKLAREQKILAKRREVAKAQQRKLSDSRNYQKQKAKVAKIYEKITNQRLDFLHKLSFNIIKNHDVIAIEDLNIKGMVKNRKLAKAINDSSWSVFTIMLAYKAEWYDKALVRIDQWYPSSKTCSGCDYVLGKDDLKLSDRLWDCPRCLQTHDRDINASINILNQGLILVKQSKTVGAIGLA

SEQ ID NO: 4019 - protein, 747 aa, Ara chloropterus
MSAAIGRRKRRKLKSEINVVPYIDVIRHSAKYSLMGTGQFQCKVQALRKKDSRKQSCFPERQTLKTFPATVHALLFFTLVIRFSYFMAWPFIAVIMTQNYHMSPIAIGLAMTSSALISVVLGMYGGQISDRLGRRVILLLGCGFSAVGYIILAQATGMALFICGLMIIGVCFAWVDPPVRALMSDLLGDRRRRALALQMRYYLINVAAVFGPLVGIVFGLTSQKGTFLITGLSYLPFFVYVLLFVPAGKLLDEGQQTGSGPAIKFHQVIGVIARDKIYIAALLCSILCSVVFIHYEAVLPQYLLSLDGNAAIKLITLILVTNACTVLVFQTFIVRFMAQMTLPRRILMGGEEPGPKDAAGSLLHVGSLKAPFLTAVMLVCRKIISETKGFAIYGLSTNRVSAXAALEHGSAEQSAGSSAICWAWSRYFERCRTGERAYPPCFKKKGRCKDSFYLANDKFKLEECTAVLPKIGRVVLREALRWPGKILGASVSREADHWFLSVQVEVLEKAAIRRRTANGITGVDLGVSSAATLSGGEKITAPRPLRGALRRLRIRSRRLSRKLESAKVMIGIRGRVPKGTRLPVSKNRTKGAKALARLHTRVARVRRDFTHKLTARLCRENQAVGIEDLNVKGMLANVRLARAIADVGFFEIRRQLLYKALRFGTRIVLADRWYPSSKLCSTCGTRNGELTLDERTWTCASCGITHDRDVNAAVNLQRIASGALGTQSALPEASPTATSVLLPEYIR

SEQ ID NO: 4020 - protein, 400 aa, Ara chloropterus
MIFEWCGLEGTLQIVWFQLDASKHHKDAKTIGQRPVGEYAAHRADPALPRPSHLSLQRQLNAIKRQQFPWMLEVTKNAPQMAIIHLGKAFENFFAHRARYPQFRKKGAHDRFSMTNDQFRVEERRIRIPKLGWVRMREALRFSGRVVSATVSRRAGQWDVSITVNTLEPPLPPAENQGVVGVDLGVAALATLSTGEVFTGPKALATLLPRLRRLSRSLSRKLKGSSNRSKAKLKLARLHARIANLRRENLHQLTTCITRRFHTVGIEDLNVNGMLGNRPLSRAIADMGFYELRRQLTYKAAWRGGQVVVVDRWYPSSKTCSCCGYRLDHLALGIRQWVCAGCGAHHDRDLNAAINLENMAVSSTVPACGGEGTGPVRMRETKPTPAKQESNGRAASNNKG

SEQ ID NO: 4021 - protein, 481 aa, Stiretrus anchorago
MTSWLIEWKLHPDTQWLKESPSQPLQQSLRDLERGYKNFFQKRAAFPRFKKRGQNGDAFRYPQGVKLDQSNSRISLPKLGWIRYRNSREVVGEVKNVTVSQSCGKWYVSIQTEYEMADPVHNAESMVGLDAGVTKLATLSDGTIYQPVNSFKASQRKLAMLQRQVSRKVKFSSNWHKQKQKIQHLHSHIANIRRDYLHKITSEISKNHAMIVIEDLKISNMSKSAKGTAEQPGRNVRAKSGLNRSILDQGWYEMRRQLEYKQLWRGGQVLAVPPSYTSQRCACCGHTAKENRPSQSKFDCRVCGYTANADINGARNILAAGHAVLACGGMVKSGRPSKQEPTEERKTKKDGKNAGGEYFSTISYYKKLSQLISRLCHLDVMTIREMRMSKHTPGPWKWWTSNSFRRLSGPDGKDGGVLCPTVSKSDGHPDLIVSKANMEPIEAAPDLLEALEGALGWLNNGLAHEHYDKAVAAIAKAKGES

SEQ ID NO: 4022 - protein, 458 aa, Danaus melanippus
MKQRPKYAWLNHVSNNIAKQAVKDACDSYKKWFDGMTGKSRLKAEKPRFKSRKKSKPAFYNDNIKLKVKHKSVLLEKVGWVKISEQLPMNTKYSNPRISFDGKYWYVSVGIDEAQPEQSLTGEILGIDLGIKDLAIVSNGKVYKNINKTGKVKKIEKRLCRLQRKVSRKYELNKEGNRFVKTCNIYKLEKEIRHTHRRLADIRQNHLHQTTTEIVKTKPSKIVVETLNVKGMMKNRHLAKSVAQQKFYEFKRQLQYKCEDYGIEFVEADKFYPSSKLCSECGHKKVDLRLSDRTYHCDKCGYTADRDYNASLNLASYIVTNRVKFKQWEKQNQEESTNNQLVEDVSEGKGYNNVAKRITFLEGTPLTSIRYNSLLGLQRAYEVAKKKGLQIGETKTGYIAVYANPSGMKKLQSLLSNNDIEDFKLQNRPSLVFIDKGSIESLTIKSAMEKLKAGDKIE

SEQ ID NO: 4023 - protein, 402 aa, Danaus melanippus
MKRLQAFKFQLRPDGQQERDMRRFAGACRFVFNRALALQNENHEAGNKYIPYTKMASWLIDWKSSPETAWLKESPSQPLQQSLKDLERGYKNFFQKRAAFPRFKKRGQNDAFRYPQGVKLDQANSRISLPKLGWIRYRNSREVIGEVKNVTVSQSCGKWYVSIQTEYEVADPVHNAESMVGLDAGVTKLATLSDGTVYQPVNSFKSGQRKLATLQRQLSRKVKFSANWHKQKRKIQRQHSHIANIRRDYLHKVTSEISKNHAMIVIEDLKVGNMSKSAKGTAEQHGRNVRAKSGLNRAILDQGWYEMRRQLEYKQLWRGGQVLAIPAAYTSQRCACCGHTAKENRLSQSKFVCQRCGYTANADINGARNILAAGHAVLACGGMVQSGRPSKQEPAEASQASV

SEQ ID NO: 4024 - protein, 356 aa, Psitteuteles goldiei
MAKHAGYARFVFNWGLHLWMSAYEEGLKPNVNSIKKVFTNYVKPQYPWMSELSSKVDQYAFINLGDAFKRFFKGISSYPKFKKKGHHDSFTLDNSGKPFNLSGTRHKLPFVGWVSTFEAQPESWVKKVTITRQAGDWYMSFFVEITPEITPKYRERIGVDLGINNLATCSDGTKFSNPKAYKAATKKLARLQRHLSRKVKGSKNWAKCLLKVQKLHQRVANIRRDTIHKITTFLAKNHSQVVIEDLNVSGMLKNHGLAGSIADASFYEFRRQLGYKAERYGSKLIIADRFYPSSQLCSNCGYRQKMPLVRRTFECQNCDLKIDRDLNASRNLEKSPGSDDYTCGRGAADSPGRSKK

SEQ ID NO: 4025 - protein, 287 aa, Psitteuteles goldiei
MESGLGYLRDDPLALRAFRLMNRAMYDQRNKQELIRNGTLESEQYWRPFQIAFVLMNVQGLGNGSHPERDLADLLWFPTGGGKTEAYLGLIGFTILLRHIRNPQQAGVSVLMRYTLRLLTLQQFERAAGLICALEQPPDGEVTEFAPGDIGRIYRLCHYLDDLLSRAKKAPRPKRGRMRKAAARMRERIRNLVDEVHHKVSLEIVRNYRVVLIPKFQTSQMVTRAKRKIRCKTVRGMMTWSHYRFRQTLMRKARETTWCEVIECDEPWTSKTCGECGHIHRKLKKSM

SEQ ID NO: 4026 - protein, 463 aa, Lorius garrulus
MWSACVTDLTYTRYGHLDADQALAAAKKDASRYYRIPTSQTNEKAFDRDPDYAWRTEVNRRSWVSGMRQADTAWQNWLDSLTGRRAGRRVGYPRFKSKGRCRDSFTLAHDVKRPSIRPDGYRRLTLPKKISVTGSIRLKGNIRHLARRIRRGVARIQSATISRSGNGWSVSILALETLDIPDHPTPRQQAAGAIGVDMGVHHLMACSDATIIDNPRHLQSAKKRLTRAQRALSRSKWRLPNGDLIDAPKRGQRVTPTTGRIKARARLAREHAAVAQHRASTLHAITKQLATSHAVVAVEDLNVAGMTRSARGTIDKPGRNVAAKAGLNRSILDASFAEMRRQLTYKTSWYRSQLLPSGRFVPTSRTCSTCGAEKANLPLSERVFHCENCATVLDRDVNAAKNVLRAALASHDAPGMEESQNARGVRSETSVALRSAKREDPPRGGPPRPSNRVRSSPQMGKRK

SEQ ID NO: 4027 - protein, 392 aa, Ara militaris
MKRAYKYRFYPTPNQAELLAQTFGCVRFVYNSILRWRTEAWYERQEKTDYVQASARLTALKKESEFAWLNDVSCVPLQQTLRHQQTAFSNFFAGRARYPKFKSKRHKQAAELTASAFKYRDGRLYMAKSKAPLDVRWSRPLPSTPSTVTITRDAAGRYFVSCLCEFEPASLPISPKMIGIDVGLKDLFVTDSGFKSGNPRHTAKYAVRLALLQRRLSKKARGSKNRVKARLKVARLHAKIADCRLDALHKATRKLINENQVVCVESLKVKNMIRNPSLAKAKAKAIADAGWGELVRQLQYKGEWAGRSVVAIDPFFPSSKRCSCCGFTMQKMPLDVRKWHCPECGAEHDRDVNAARNIKAAGLAVLAHGEPVNPELHRAAQVRLSEVGILAL

SEQ ID NO: 4028 - protein, 1749 aa, Picochlorum sp.
MVGHISVEATQAAHYHVYRCLEEGIDLGKMDYNNFWNYIFDAIKDLRYGDGLKQDIRTPLYDSLRQYAEEAPLPQAGESLRWDVDGHTAWRRRCLLAAADAKAQNLHIILHHNAYHNLCKIVKVRLAHTFGARYADDFRSLVSAVAVAVWEDVDFRNVKEGYDRLKNLTEEEVQDIQETIVTPIREKFPDQEGRKENAKMMEFVHFVAGEVMEYNRHRSEQSGPGSPPQDIELVNMCVGEKLAVAIERDLRKGSLTKKAFVHHVKHALDIFRQCSGPDVFTTRTDQGLRDGDNGPRVVDRNDRYRGQILCLLSERILYQSQKGGAEFLSQDQVGWIDGISSELRLPSSLADYDMTKNDFADYMERVILPKLRSSFLFVAPRRSNDAEAPWGKRIQVPSVLPLAKKRACHISIPTAAITGLAEGLAQESSDIAKAIHGPRETLREARQRVTSIESRIVDMDKENWLTDEQQKVKQELEDNKKKSKLEFEQTPTGKRHRYKKSDEEKKLCKELTDRKTAILNGSQEYVDAREEVEKAALRYQECCWTALFNIKVRRCQNGHQWLFGGQLSTDGVDVSMQYYRLKTDDEIRADEEEKERIKARAAEKATGSSTGKPRKRKRTSRAGPGTPQSSNVSSRGNLDRAKDLLAASPDNAWVFDPGPDGHVGIKMEQGKMRELCQENKRHGDYDPFETMSLTNHEMQSRAGILKRKALERAWSQARPGIGAWKQEAPTRKVGTARDMLAFCRTTNSHLNTVYGFYSQNCFRRQRFSVYTRTQRMLDSMVERICGTKDREAQSKTVVVFGDASINSGKHGKQRICFRALKDLLRQRCCFIEIGEFRSSQYCCACHAKLEDPPAVGLHKRWKVRRCMNNGCERAFWQRDVNAAINLAKFFLWEINGEEKPTVFQRPRTRAEEDIPDLTKFETKSNRVKGLSFHPKRPWILASLHSGVVQLWDYRMGTLIDRFDEHEGPVRGVDFHPSQPLFVSGGDDYKIKSRTCAAVLTGHNHYVMCAQFHPKEDLVVSASLDQTVRVWDISALRKKNVTPGMGPRDELSMRAAQANAELFGSGDAVVKYVLEGHDRGVNWASFHPSLPLIVSGADDRQVKLWRMNDTKAWEVDTLRGHVNNVSSVLFHPKQDLIISDSEDKSLRVWDMSKRVGVQTFRREHDRFWILAAHPNINLLAAGHDSGMVVFKLERERPAFASHGTTLFYIKDRYIRSYDFATGRDAPLTALRRNPAALYNQGARSMSYNPAENSALVQSDAEGGTWELYPLPKDGSSVRDTGDVKRGDGSSTVFIARNRFASFDKSSNTIVVRDLRGDITKKVASPLPATEGIFYAGTGMLLLRSEEKVALFDVQQRNVAADISAPMVKYVVWSGDMERVALLSKHSIIIADRKLQNTVTIHETIRIKSAAWDDAGVLVYTTLNHIKYCLPSGDSGVVRTLESPVYLTKVHNDMVYCLDREAKPRVVQINSAEYKFKLALSEKKYDVVLGMIRAGKLCGEAIIAFLQEKGYPEVALHFVKDERMRFNLAIECGNIEVALESAQALDTRVMWQRLGTEALRQGNFKIVEYAYQKTKDYERLSFLYAITGDTDKLAKMGKIAEVRGDIASAFHNALYIGDAKERVRILREGGQPSLAYLTACTNGLAEEVAELEAEIGEENLPSLPNPANVKQLRIPVPITKEANWPLLTVSKGFFESLATKDAEKAKGVAQAAAAVADEVDLSAVADAWGDEDDVLAIGDGVEEEGEGREIG

SEQ ID NO: 4029 - protein, 917 aa, Picochlorum sp.
MVGHISVEATQAAHYHVYRCLEEGIDLGKMDYNNFWNYIFDAIKDLRYGDGLKQDIRTPLYDSLRQYAEEAPLPQAGESLRWDVDGHKTWRRHCLKAAADAKAQNLHIILHHNAYHNLCKIVKVRLARTFGARYADDFRSLVSAVAAAVWEDVDFRGVKEGYDRLKNLTEEEVRDIQEAIVNPIREKFPDQEGRKENAKMMEFVHFVAGEVMEYNRHRSEQSGPGSPPQAIELVNMCVGEKLAVAIERDLRKGSLTKKEFVHHVKHALDIFRQCSGPDVFTTRTDQGFRSGDNGQRVVDRNDRYRGQILCLLSERILYQSQKGGAEFLSQDQVGWIDGISSELRLPSSLADYDMTKNDFADYMERVILPKLRSSFLFVAPRRGNDAKAPWGKRIQVPSVLPLAKKRACHISIPNVAITDLAEGLALECSDIAEAIHGPRETLREARQRVKSIESRIVDMDKENWLTDEQQKVKQELDENKKKSKLEFEQTPTGKRHRYKKSDKEKKLCKEVTDRKNALLNGSQEYLDAREEVEKAALRYQECCWTALFNIKVRRCQNGHQWLFGGQLSTDGVDVSMQYYRLKTEDEIRADEEEKERIKARAAEKATGSSTGKPRKRKRTSRAGPGTPQSSNVSSRGNLDRAKDLLAASPDNAWVFDPGPDGHVGIRLEQGKMRELCQENKRHGDYEPFETMSLTNHEMQSRAGILKRKALERAWSQARPGIGAWKQEAPTRKVGTARDMLAFCRTTNSHLNTVYGFYSQNCFRRQRFSVYTRTQRMLDSMVERICGTKDREAQSKTVVVFGDASINSGKHGKQRVCFRALKDLLRQRCCFIEIGEFRSSQYCCACHAKLEDPPAVGLHKRWKVRRCMNNGCERAFWQRDVNAAINLAKFFLLELNGEEKPTVFQRPRTRAEEDIPDV

SEQ ID NO: 4030 - protein, 1768 aa, Picochlorum sp.
MVGHISVEATQAAHYHVYRCLEEGIDLGKMDYNNFWNYIFDAIKDLRYGDGLKQDIRTPLYDSLRQYAEEAPLPQAGESLRWDVDGHTAWRRRCLLAAADAKAQNLHIILHHNAYHNLCKIVKVRLAHTFGARYADDFRSLVSAVAVAVWEDVDFRDVKEGYDRLKNLTEEEVQDIQETIVTPIREKFPDQEGRKENAKMMEFVHFVAGEVMEYNRHRSEQSGPGSPPQDIELVNMCVGEKLAVAIERDLRKGSLTKKAFVHHVKHALDIFRQCSGPDVFTTRTDQGLRDGDNGPRVVDRNDRYRGQILCLLSERILYQSQKGGAEFLSQDQVGWIDGISSELRLPSSLADYDMTKNDFADYMERVILPKLRSSFLFVAPRRSNDAEAPWGKRIQVPSVLPLAKKRACHISIPTAAITGLAEGLAQESSDIAKAIHGPRETLREARQRVTSIESRIVDMDKENWLTDEQQKVKQELEDNKKKSKLEFEQTPTGKRHRYKKSDEEKKLCKELTDRKNALLNGSQEYVDAREEVEKAALRYQECCWTALFNIKVRRCQNGHQWLFGGQLSTDGVDVSMQYYRLKTDDEIRADEEEKERIKARAAEKATGSSTGKPRKRKRTSRAGPGTPQSSNLSSRGNLDRAKDLLAASPDNAWVFDPGPDGHVGIKMEQGKMRELCQENKRHGDYDPFETMSLTNHEMQSRAGILKRKALERAWSQARPGIGAWKQEAPTRKVGTARDMLAFCRMTNSHLNTVYGFYSQNCFRRQRFSVYTRTQRMLDSMVERICGTKDREAQSKTVVVFGDASINSGKHGKQRICFRALKDLLRQRCCFIEIGEFRSSQYCCACHAKLEDPPRAINLAKFFLWEINGDEKPTVFQRPRTRAEEDIPDLTKFETKSNRVKGLSFHPKRPWILASLHSGVVQLWDYRMGTLIDRFDEHEGPVRGVDFHPSQPLFVSGGDDYKIKVWNYKQRRCLFTLLGHLDYIRTVQFHSESPWIVSASDDQTIRVWNWQSRTCAAVLTGHNHYVMCAQFHPKEDLVVSASLDQTVRVWDISALRKKNVTPGMGPRDELSMRAAQANAELFGSGDAVVKYVLEGHDRGVNWASFHPSLPLIVSGADDRQVKLWRMNDTKAWEVDTLRGHVNNVSSVLFHPKQDLIISDSEDKSLRVWDMSKRVGVQTFRREHDRFWILAAHPNINLLAAGHDSGMVVFKLERERPAFASHGTTLFYIKDRYIRSYDFATGRDAPLTALRRNPAALYNQGARSMSYNPAENSALVQSDAEGGTWELYPLPKDGSSVRDTGDVKRGDGSSTVFIARNRFASFDKSSNTIVVRDLRGDITKKVASPLPATEGIFYAGTGMLLLRSEEKVALFDVQQRNVAADISAPMVKYVVWSGDMERVALLSKHSIIIADRKLQNTVTIHETIRIKSAAWDDAGVLVYTTLNHIKYCLPSGDSGVVRTLESPVYLTKVHNDMVYCLDREAKPRVVQINSAEYKFKLALSEKKYDVVLGMIRAGKLCGEAIIAFLQEKGYPEVALHFVKDERMRFNLAIECGNIEVALESAQALDTRVMWQRLGTEALRQGNFKIVEYAYQKTKDYERLSFLYAITGDTDKLAKMGKIAEVRGDIASAFHNALYIGDAKERVRILREGGQPSLAYLTACTNGLAEEVAELEAEIGEENLPSLPNPANVKQLRIPVPITKEANWPLLTVSKGFFESLATKDAEKAKGVAQAAAAVADEVDLSAVADAWGDEDDVLAIGDGVEEEGEGREIG

SEQ ID NO: 4031 - protein, 917 aa, Picochlorum sp.
MVGHISVEATQAAHYHVYRCLEEGIDLGKMDYNNFWNYIFDAIKDLRYGDGLKQDIRTPLYDSLRQYAEEAPLPQAGESLRWDVDGHTAWRRHCLKAAADAKAQNLHIILHHNAYHNLCKIVKVRLARTFGARYADDFRSLVSAVAAAVWEDVDFRGVKEGYDRLKNLTEEEVRDIQETIVNPIREKFPDQEGRKENAKMMEFVHFVAGEVMEYNRHRSEQSGPGSPPQAIELVNICVGEKLAVAIERDLRKGSLTKKEFVHHVKHALDIFRQCSGPDLFTTRTDQGFRSGDNGQRVVDRNDRYRGQILCLLSERILYQSQKGGAEFLSQDQVGWIDGISSELRLPSSLADYDMTKNDFADYMERVILPKLRSSFLFVAPRRGNDAKAPWGKRIQVPSVLPLAKKRACHISIPNVAITGLAEGLALECSDIAEAIHGPQETLREARQRVKSIESRIVDMDKENWLTDEQQKVKQELDENKKKSKLEFEQTPTGKRHRYKKSDKEKKLCKEVTDRKNALLNGSQEYLDAREEVEKAALRYQECCWTALFNIKVRRCQNGHQWLFGGQLSTDGVDVSMQYYRLKTDDEIRADEEEKERIKARAAEKATGSSTGKPRKRKRTSRAGPGTPQSSNVSSRGNLDRAKDLLAASPDNAWVFDPGPDGHVGIRLEQGKMRELCQENKRHGDYDPFETMSLTNHEMQSRAGILKRKALERAWSQARPGIGAWKQEAPTRKVGTARDMLAFCRTTNSHLNTVYGFYSQNCFRRQRFSVYTRTQRMLDSMVERICGTKDREAQSKTVVVFGDASINSGKHGKQRVCFRALKDLLRQRCCFIEIGEFRSSQYCCACHAKLEDPPAVGLHKRWKVRRCMNNGCERAFWQRDVNAAINLAKFFLWELNGEEKPTVFQRPRTRAEEDIPDV

SEQ ID NO: 4032 - protein, 411 aa, Androctonus mauritanicus
MSESEQQSLDGFVDPTATHTETVTRTVKCRLETSRRKTARVREKIDAWQEIAARMAELMPSYRESQWQPRISGRFKLVRQEFPTEGHGINGLKSHDAYQALYKVAEAFRSWKQNGKPGDENPTGRFGNGSYLRLAHSSVDIVENETGFGVKLGLEPYNPEWFSIVAGSYQTQYLKRIVDAEDDLSAGSAEVHLSDDGTPILHLTVSEEIEVYDIGDVETVIGVDIGENVLAAVAVVGVDGTVHSAQIENGSAATGAEFRQKREELSYRRDIAFRNGNLKKIKEARNWREKYTEHVLHTASKSIVEVALDNSPSGIVLEDLTDYRMTAKDPIHDWPYASFQEKVIYKANNEGIPVETVDPAGTSVTCRECGCHDPMNRGRQKTTEFDCIRCGYTVHADINAAINIPLKAIRK

SEQ ID NO: 4033 - protein, 653 aa, Androctonus mauritanicus
MRYHRAALGKAYGSVGTGGGPRIIRQYVKKAIVGDEVSYKRKFKELAIATKMSRQWSKEDIMAAYLNTIYFGRGAYGVAAASKAYFNKPLKKLTVSESALLAGVIRGPSIYDPAVNPDLAVDRWEYVLNGMVSTGALSQSDRAAQKFPKIAKVRSETSTDNDGPNGLIRRQVLAELEELDISEQEVQTAGLKITTSIDPKMQKAVLAASRNKLDGEPDKLRTASVSIDPATGGVKAYYGGEDGQGWDYASAGLQTGSIFKVFALVAALEQDIPLSQQYSSAPYQSPTGLTVENSDGESCGTCNLATALKNWNDSTKGKRKGPKVEFPRFKGKRHTWSCRFTTGSFGLTDSDRRHVKLPRIGTVRPHESTRKLARHIERGTATIRSATVSFRGGRWFVSFSVKISHNDPPTADPDSAVGVDLGIKSLAVLSTGEVVPNPRHLEAAQKELRRLQRQAARRTGPDRRNRQEPSNRWRKIQARINRLHAFIANARRDGLHKLSSRLVREHGAIVLEDLNVKGMMSNRRLARHVAGVGMGEFRRQIEYKAAWSGVHTHVASRWYPSSKTCSDCGAVTAKLRLSERVYQCEHCGSVLDRDLNAARNLGALVERDTSSASCVVRLNEPAGNPRKPTPGGNGYRHGKAHTGQRQRGNALAR

SEQ ID NO: 4034 - protein, 388 aa, Androctonus mauritanicus
MRCTYRLRVSNTARRVLLAEWGRCRWVWNECVAVSQRAYRDGEKVGPAALDKKLTTWRAGHDWLREGGSVPQQQVIRDFGRSKAKALKDIRDRLPQHRRAGMPTFTKKHEAVPTLNDTRRGFSFRDGRLRLAGGIEVRPVWSRELPDVPSSVRVYRDSLGHWYASFVVAAQTEPLPEAGRVLGVDWGVAETATTSDDAYDLPHAHHGKTAQAKLGRYQRMMARRRAPNGKRQSRGYRKAQRQAAKQHRTVARKRQDDARKWAKRVVRDHDQVAVEDFRPKFLGKTTMARKAADAAIGATKTELVAMGRKHAREVRLVDPKYTTRDCGQCLARTKHALPLSERTYTCTACGTSLPRDKNSARVMLVRAGFVPAGVEGIRPDHPLDGQAA

SEQ ID NO: 4035 - protein, 1703 aa, Androctonus mauritanicus
MATAIDVLTFIQQRYTTTGLMQRQKLLYYSQAWHSVWFGRALFSDPILAWKMGPVTPTAWKLDKERRTTPDTDVRLTATEILRKSLLKGSVSAAERPRTLRQLRSVYSPGPGPLESGTGGMGAGAEVATHHNNHHSPYRPASSTSGSASSVNQSSSTGNSENEKRNYAPGVIMTPFDEQEEWAKISEIMASFGTGLVRESVFVSELEKEFQTRLGLTTDTGSPCVTTLVGQWLAKLSLNEYETLFLNYGFDDLDFINGVLDEDDLKDMGINGDQERAAILEAASLLNNGVEKILASNPSSKKVDDWLKSINLEQYSETFRKHLYLDMERVKRVWEVELAATEENSSCLGYTQTHVRVFLHMCGESVDLDSASNAQQTASQSASVRILSDRKDAIIEIPKLPETYWGPGSTKADPKEIRPFKIDVPKSVIDDLNLRLDKSRDLVAPLEGAKWTYGFSSTYLKTVVDYWRNKHDWSKRQALLNKYPQFTTTIQESASLASQHGAGLAGQGDRVLVRFDRRVLDLLDRVVQRLFRPVDAVVQRRRGGQQLVVCVRGDRVGMVLGGLDALREIAVDLSLLLHRLIEVLPKCGELLLALVHGLLHVIQRRLERADRLGVVAGGRLQRLHIGLDCGELLRYRVVQRALPASRPLTGRRPARAGAVRGAAARRCRRIPRVPRPSLLTLLAAGGDGDLVAGDLAAGLVGGHDPVGAVLLVGVPVRTRPGDVVDGPVAPVDRELPGGRVVECQPDRVRINVSLNRAAREGGGLRGGLLRREIHCDGLVPVSGGESNGLLLTGCGGRILVRGGATRVRVQRLAVAVAPVDRPGLRRHLGPVRHAEVDRHGVAAGGRGRHGRRDSVRVPQRFRTAARLWWEQVDDVEPNVLRVARGLEIPLRHVETGVERARQRRRHPLLVVGDVVRAASPQGAGVRFRVHRERDGSVFERDRLGRGAQAPRHEDVAVHGEIAAVGVAGQARFARVRGLRPHFQREPDIAGQVPSDFDAAGAAVIVDDRLPRRIHDREDVGVDLAELQLDRGPLDDRRPRPGDAGGPVGVLGGVVLAVLRLESDLGLDEALRHDLRFRSVDRLSAPVQPGHADNAGADVGRAQRLLGGGSWARRGGVVTRTQRARICNLSQVRDDLDSLGFAASKLWNVARWTAGRVWDACGQIPTDGDLKSYLKGSGRYVDLHSQSSQRVLEELDEAFTGWYGHRNNGNQKANPPGYRKHNDEHPRSTVTFKQKAFKHDAKNGRIRLSKGRNLKDHRSDFVLCEYDVIGPRGTTVENVQQVRAVYEHGVWRLHIVCDVEIEVSEASGNGVAGIDLGICNIAAVSFGDESLLYPGGAFKEDEYYFLKKRAECDESTSREARRLDQRRTDRRTHFFHTLSKDIIEECVGREVGTLVVGDLGGIREDNESGEAVDWGKHGNLDLHGWPFDRLWKMLKYKGEINGIDVVRKSERDTSKTCAVCGHKDNSQRVERGLYVCEECGTVANADCGGAENIRQKAEVPPSPSAERSDRSNGWLAQPAVRLFDRSEGRFAPREQVAQTNREPFVTVFTNDVDGRTAIGQSGRTKLGTGPIQRRFNRQPGSERPDSPIQCPAFGGRQGFIRLLGRISDMGIVKTEGVLGGKPRLEGRRISVLQIKDLVDRGREPTRIAADFDLDLADVHTALSYYYVHSEEMREWREHQAELERTLREREITGPEDIPDENRRR

SEQ ID NO: 4036 - protein, 371 aa, Androctonus mauritanicus
MAKQHKAYKFRLYPTEEQESVLRKTFGCVRFIYNKMLSERKETYDRLKDDKEALKKVKHPTPAKYKKEYSWLKEVDSLALANAQLNLDKAYKAFFKGNAKFPKFKSKRHKQSYTTNVVNGNIELLDRHIKLPKLKIVKMKQHRQIPVEYNMKSCTISMTASGKYYISILTEYEKEIKGKKIQSVVGLDFAMDGLFVDSATGKKANYPRFYRQMLDKLAVEQRKLSRKKKGSSNWNKQRIRVAKIQEKVANQRKNFLHHTSKELVVNYDAIIIEDLDMKGMSKALQFGKSVADNGWGMFTSFLLYKLHEQGKQLVKIDKWFPSTKTCSSCGSVNEIALSERIYHCACGLNLDRDYNAALNIKKEGIRLLAIA

SEQ ID NO: 4037 - protein, 368 aa, Androctonus mauritanicus
MFFMKTRTICCKLLTTPAISSVLKETSERFSGACNYVLEVAIREKTHNAIKLHHLCYTEVRKRFGLSANLAVRSIRRVVSCMTKLKGTRKRPKVFKPKSIDYDARIFSYRQADESVSLTTIKGRIRIPMILGEHQRKQLIGKSPTCATVINKSGIWYIHIVVDFVAEPFDGDGIMGIDLGINNIATTSTGTMIEGKTRQEYKQKRCAIRASLQSKNTNGSKNLLKRLANKESRRIQYENHVISKSIIEEAIRHNCGVIRMERLKHIRSRTKTWNKHRNRMIAGWSFYQLQKFVQYKAEGLGLSVEFIDPSYTSLTCHRCFQLGSRNGERFNCTTCGISHADVNASHVIALGGASVNTPELGVCTPKSP

SEQ ID NO: 4038 - protein, 537 aa, Androctonus mauritanicus
MNSRKILVSHSHRDRRCPIDQLHSLGLRGAGKHLGVPRAGFRDRNHTRVTPLSPAYIAESQKRRAEEVLDVLRRKDGNLTKGASKMAATKNRQLKPQKRILKVMWRHKEYPLGQHIPMSTKIGPNMDIALDGSKIYDYHQIKSLILESYVDQVNQDYFRGAVVTLADKDEKLIDRNLIVDGEPTDFWTYAKEHMPKDSGKRLTIHLLTSIRQRPKFEANECLSSIHSFFFPKRDSTNRQPPPYSGGTCALTVLDYQIGDVPIVLHREIPNDAALKQVTVKREPTGEWFASISVETGDGTPAKPDNPERCVGIDVGILKFAHDTDGFALGSLNLSDERNRLDRERRKLSRKEHGSNNWERQRKVVAQRYADLKRKRRDFLHRVSAYYAREYDLVAVEDLNVRGMLESPSNSRNTASAAWATFRRMLEYKCEREGTHFVAVEPAGTTKECSRCGVATDKPLWVREHSCPSCGFEADRDANAAVNILSRGLADVGVVHPERTPSETATATGTDVSPVPASRVMEQGSPALNERVSASRAG

SEQ ID NO: 4039 - protein, 837 aa, Androctonus mauritanicus
MHFLEEKHDISPAEVHLIGHSLGAHVAGYAGERLQGLGRITGLDPAEPYFQYTDPKVRLDPTDAQFVDVIHTDGGSIIVGGLGMIQDCGHVDFYPNGGKRQPGCNHGVIGSIEKEGDFLYGLVVEQTYKYRAYPTEAVAAEARRHINICREVYNHALGKYDTAPDDDKPNYTNLQNRLPSWKQNWEKWTSVNSKCLQMAVRRIFSSLSVLSSLKAKGYDVGKLKWKPPREYRSIVFNQSGFDVDDNTGRTNHAVLELSKIGPLELAYHRPLPEDATIAEVRLKEEKSGNWYASIVVDHDPDYPDKPAVETIDREDTVGIDLGILKFIHDSDGTAVTPLDETTDRNRIEKRHRSLSRKEYDSSNWENARRKLAEAYERLKHRRKDFREKLAASYTSQYDAVFLEDLNVRGMLEGDSNGRNVASMSWRETISAFERHGEKNGCHVLTVPPEGTTKRCAKCGVETEKPLWVREHSCPACGFETDRDANASYNVQRLGLEELGINYAVDELLGLGEAEETPAETALPVSTVAVDAQCVVETGSHGSPEPCGDSGTLSQHSNTTTTQARDRRSVWLHWTSLLAVSGRGGGIHSFATGHLENIVRRLSPLNSDVSRVMQQTGIKMAIQWAVFMVLSDLVLDEAIYFLHQEEGVGGQNEKKKKKGRRDFRPEDKGVPRDRWVDYNRFTALLRCTAHLQQGCQRHVRHVATFLWPVRSPIERVGPSGTANSIAYEVARSTDLVIATVDRYAVGYHTGMYTCMPTYITSSAADGRLVTLSVCYAGSGSHPGSSNSAKKFEKCGRVLSGGMKEAVPQAAYHCGGVNWMMEDIFSSESELCAEKNELS

SEQ ID NO: 4040 - protein, 310 aa, Androctonus mauritanicus
MTLFDDDTVSLSTTESRVRCPLDLPDADDGYQRQYLDSDEWSVTESTLTARDGEFFLHIGFRRYKNDTERNTAEDGTVLGVDLGIENLAVTSTAYFFSGRELTNDLREYEKVRAGLQQTGTRSAHRTLAQSSGRELRYVRDVLHRASNALIDEALRYDCDVIAFENLTHIRDRTGASWGHKWAFRTLYEQAEYKAEAVGISVKQVGSAYTSKRCSECGFTADENRPSRNDFRCVKCESEANADYNAAKNIGMRYVRRGQQSSRRTGDSQLALKSGTVTPKRGFTTYPDGFEAEFTDKPHPPRARPSGQAK

SEQ ID NO: 4041 - protein, 1182 aa, Androctonus mauritanicus
MRRTRCTPGRGGPLGLRGRGAFVSARSWSAPAPMTTLYISRRGDVCPYSSRLSELQGAKTPPSSARRGAGASGSRYTVRFTYKYRLKPSDALRAELDRHRDIYRQAYNHFLHRLNHIEDTSRYDELGVLPDLKEWWDDLREVHSKVLQKVVQRLYDNLSTLKGLKENGHRVGRLRWKGSGYYHSFTYSQSGFKLDKKSDRDRDELYLSKIGRIPVVAHRDLPTDATVKAVTIKREPTRRWYAVLSVETPDEPPEKPDEPKRCVGIDVGILKFAHDTDGTAVESLDLSAERERLHREQRTLSRKQKGSANYAKQWQKVAECHETIRRKRHDFLHKLSRYYAESYDLVAAEGLNVRGMMEQSRNSRNTAHSAWRTFIEMLAYKAESAGTHLVQVNPRGTTKECSECGVETDKPLWVREHSCPSCGYEDDRDANAAKNILNRALSDIGTGQAKSTPSETATAVDTTVVSASRVVEPGSSTLNGAASAAKFRRRRRHTRWAAWSAEACSPGRSPRRHWCHAACPPRPRSPQGADRRGGPPGTARPPRRSAAPAPPASSPRVRRPHRADGLGIARRIEHGQHLGDGAAGEGGEVHLHVVPLVGVQDPALAEAAGGGLGAVLIARRGLREAAAVIQLEVEGDVGRRPGLGLVELGVDVPAQHVTGGDGAPAQLLEPVEHRYRGLGRLAAVPRHAQRTGREESAAVPAGRRSHGSLVCGDDHARQVIECRPLPGRGMPVGRAPHRAGGGGAGYFRAQVRRTRETPWSTLSRPCPAPRPQGGVPLALAGGGRRRSAGPAGGGGPGARDRRPALHPREPSEHSGGLLHRARGDRLRAVHGLHHGGVPGGDRSDQLLGLRGGAGTVLLRGLRGQRAHQPSGLRGLRGHRDVLRGRRGHRCGYARRTPPPAVRAAPGLIRLAAADLRGGRHERICGVLEQPDVEGGIGPAHGAHRGELHDLLGHRHQRGERGELEGAGQLLLRLGVDGAEGDVRVRLGRRLVGGCVRGEEHRGRRDLLWLAGPAQRDGFDLRRPPVFCHGRRHIRPDEPRADRVRTDAMLRAFTRGHPGQRLDAGLRGRVRALADVPALGRDGPDVDDRAPVTGLPRVPQQLAREQPRALEVDVDGRAEVRQLRAVDQAARRDPGVVDQHVHATVPGDRDLFPVISFQIVPVLEGMFYQILLLPVGCSYIPFI

SEQ ID NO: 4042 - protein, 711 aa, Androctonus mauritanicus
MEYSHRYSAYPTQDVAAELERHIDIHRQAYNYTRYEYTHLPDDSDTIGAAYKHHDRLTEWKREFPLFTEVHSKALQRTVTRFYQNLSNLSKKKEKGYDVGMLKWKPPREYRSITYTQSGFELKNTSGRRATLWLSKIGDIKIRHHRSIPDEPSIKEVTIKKETTGEWFVSFALETDDEHIPEKLAVDSLDTSNSVGIDLGILNYIHTSDGDTVDWLDLDEEYDRLRREQRKLSRKAKRSNNYEKQRLEVAKVKRHIRRMVLDYQHKLTTWLVREYDAVFVEDLDVSGMLQAEGNARNKQDAAWRQFITLLEYKGDLYGTHVKQVEARGTTKECASCSVETTKPIWVREHSCPACGFECSRDGNASLNVLQRGFAELGLGWPESTPVETVLPVDTTVERARSDARTPMTRIEIWSRPQEDIQRPPDETRYYRVGIWEDGEWVEGDLGSEEGDTEEDIIRRHGSGRTTLAVAADDRGDLLDERVENGLIHRKEVHEAIPAPEDQVNTEEVRWLVVTVGDQRRITSQLNSSWNEDVSFLVGALDNEHITIKLKAKRLVSTITLAQYELALGVYDWENTQVIETVLQQKKPSRNSTNIPNISARLEYSSIPTLEPDAPQPSIPENLESRTADFPMIYPVAGPRKRRKDPLNIPMCSNCGKVYKHSRSLWRHRTFECNKSPAFACNYCNYKAHQKHRLTVHIMTQHRVGEKPKKAD

SEQ ID NO: 4043 - protein, 826 aa, Androctonus mauritanicus
MQELFRESADKPTVIWTHDIEQLKRDSIIKIVRGLSNNTPTAKIDMTMLSQTEKSLLRQRTSSVFERSEKPVHVIIFKHTESFYRNSSHILTTISNLTGIKPRPKVIMVIDGNGRYALLKKDMKELLLLAWKKKFLDVTLVYVKPKPKSCPIYLLYQPFEGVFQEKYLSRNSSLFPDKRKDMKGHRFTIADPRNIRQDIVAFEELYKYHKKFFCTLNPGNYIFIKYMFCQVSNCTAVVVGKKPEHEANIIYHAHFFDQKDNQERLYGLNIPPLTRWTGQGCKVTALVPCPYEPRNRNRSSTPLNIISGSISQEESMRACFTQAMQEFGPINILIVDSDFRDESSQYSILDMPVGVWETTCQANVRGTFIAIQQCLQVSKEMMSRIQTDYLAIVVMGDRFGLQEGLVREVNREIRRLSIEARINAVAPWVDVYPGAKESDKNEMWSASNITGADMVWFPRKIADLDQAQKVLMAGSELDADHPVSKYISTCRQLSRSVQGIFGPSDPILGAHIQSICEALDVPHLEARIDFETAYKEFSINLYPTQDHLNKAFRDVMIFLNWTRVAIIYEEDHVRVSQELFEKYHLLRTKKDKKRIVGVDVGIKSAAVFSDGTVIENPKSYEKSLKKLRRLNKELSRRRKFNKTTGEVASQRYEQTRKKLQKQYAKAMNQEVDFAHKLSKRLVDEYEIIGLEDFNIAGMLKNKKLSRRIAHAGFGRLKIFTKYKSEWYNSRVIMIDRFYPSSKTCSECGAVKAKLSLKERVYECDDSNCGLILDRDLNAALNIEWKAAQGCGEALNGQGDESAGLVEGLPSETGSLGTDKSNALVSI

SEQ ID NO: 4044 - protein, 419 aa, Androctonus mauritanicus
MATALTSAYGGDTLTVSDMMKDPTWIPERILEELDGAFLEEALFRNGGTNDGVVAYREAAAPFLNDDVEEVAEFAEIPVSNLNLGKARTLVGVKTALGVRVSREMVRENRLDMVSRQTTALADMLDDHRELYNAALQERRGAYQHPSRTSIRYGDQSAQLRDVRTFDPDRQGRWSFSNQQATLRRLNKAFAAFFRRVKTGQKPGYPRFKGVGRFDTTSDGQHIDNPRHGQRLADELAAAQRHLATFPTRKRARDRTKPHREAARKVGKLHAKLRRQRADYHHKTALTLVRAYDTIACEDLNIAGMIRAPAPKPDPDQPGAFQPNGAAAKAGLNSSILDAGWGQFLGILAGKAESAGRRVIPVDARNTSRTCPDCEHVDGGNRATQAEFTCQRCGYAANADVVGSLNIASRAGLVLRAAA

SEQ ID NO: 4045 - protein, 866 aa, Androctonus mauritanicus
TGTSNNQRVPDLVNMVGAITHLIQAATASGESSILHEVGFYHDETLHFSVNQFWPLLFDGITQFVQLMRHLRYMEENEQADLWFDIAPNQYCPSLSRRAVHHVAQSLRVRQVEFGVRARTERAVVEEIGAGTQLQREEARNLAAFHFCMEAAPYVSFLRPANANLVAILFCIEPEPVEYHILLKKDGPLISITDIPISKAKVHHFNSLSVSIFTIIAIANEYIRRTVITRALPTEEAAALIDATIAEYKESCQIATDMAWPDMKSKSDVQPLAYDTIREETNLTSQHAILATHQAAEAITGCHEQDAKGRKTSKPTFTADTVTYDSRTMTLFDDGTISLSTVENRVRIALSLPEDEDGYQHQFIDSDEWELTESTLSKRDGSYYIHLGFRRFATDAEREAKKDHANDTTTEDGTVLGVDLGVANLAVTSTCLFISGDELTHWQREYEQRRTSMQQTGTRWAPIDMQRVGRKEESRFTIILHEAANAIVDEADANDCTHIAFERLDGIRDRLPWATWQHRWAFRKVYEFVSYKAVARGISVRQVNPKNTSRQCSRTDCGFTHPDNRPKTNGQDEFGCLKCGYEVHADYNAAKNIAVKYARRLHRLHKSSDGGAPVDVPLNSGLLTVEGPADVSVGGETPQFFLPHHLLTPEKELNYLRKVSELILIALFSRSLVCHTSNKNLLIEILACKVLLPSVNLVTDPDYINQKILDYMEQIEQSHNLHQHSTAHAESYQDFIHLIRNSEDVDYLKHIRYSIMTEIMQATTVQNLKKAKDLDKEKEQSSTKKLKRYNPALLCEIPMRSPFEGFGLPGFPRRVGKFRNRKENSTVRKSLGEFIRKENVFAVFGNWGTGILARILGGRGRIKKHG

SEQ ID NO: 4046 - protein, 361 aa, Androctonus mauritanicus
MTELEFLSFMSYKEEILENYVPKLRKTYNAREIDDEHPLRFTNQAAKFDHSPEREHEYTWWVPRPGRGTNFWIPLRINPEQGELWSDLLDGEASAGEIRLQQHRTSWELHVTVEFSVPEPETDEERTPVGFDIGETALITGCALKRDLPVQPRMWSGKRAKHLRKEMFTTLRRLQERGASERRVDERFGHYQNALTDIVEKASREAVEYAQRFDSPVIVMEDLGFIRERLDYGKWMNRRLHAWAFARLQGRIEDKATEAGIPVEYVNPAYTSQECHECGHIGYRREQAELVCRNPKCRVTEFQADISAAASIAQRLDPWGERCLWKSDTDDSPRDGSGCDTATRHPEQSAPTQMTLGAWSS

SEQ ID NO: 4047 - protein, 1097 aa, Androctonus mauritanicus
MKRSNTFDVAPRSDADAEILRRVLDASASLWNELTYERRQQFFDGDSVWNTEDYHKRYVGVLGSASAQQTIRKNDRAWKGFFDSDEPDKGLPGYWGNEEDGRDLRWYGRNDQYKIQWGERSRLDILVGSDLKDEYGLGAQERLRLEIRGKPKWSGKQGRLELYHDESSGRFRAIQPVRDCSPQASPLADETAALDIGANNLVACTTTTGKQYLYEGRGLFGRFAETTERIAKYQSLLDEDRYSSNRIRRLYRKRTKRRNHAQDALVRDLVERLHEQGVSEVYVGALTDVLETSWSVTANQKTHNFWAFQQFVNRLACVCEEFGIVLEADGEEWTSQECPHCGKRDETVRHKDTLTCPCGFDGHADLTASRTFLHRQLDDSQVGLMAQPVRLKWNDHKWSESPYSCSNEVRGNPSDLPDLDGINQWDNIVKNSPSKRQEIDLNIDDEGDVSTLRVDSPQHHWKIVVGDLQGGKYDGYYGDGSDLNPETDPVYSPESITSSETHKSLQKLARKYSSITVTPQTLIPSLRENSTVKCDYPVLSRKRCSSAENPHTICLYDIKTDPCELNDLSSDYPDVVSTLLNRINEHKKTLVPSLPSVRAVPTQPRGPQPAYGLEYRRRLDLAAVQREPLRRRPRHRRDIRPCGLVRERVRALLVLRDDPLSLLGHAERLGPEADVLLPRHADGLGEDGRGDLRELVVEGLVAQLRAEDEVGLEGGDLLQVGLDLGAHHLGLLDLVGQVLVPVIGPRLDDADRRDPQSEDRVGLALAEGDDLLGLARDVRRAHGVLDGGAPGGCLPVGGAGRAGGAARGEGEGERGGNGDRSEXXXXPVRPRPAVATLVGSHGPSVVPRACRTATEFSESEEAPGSEDPQAARDRDSAVAIATAPRRGVIRGAPGWGRGAGHGETSVLGKANNTRSCLTRRAGAGRRSTRAPTDWLAGPMDARLPAPLRPGDTIAVTAPSSGVPQALWPRLDAAIAHLRRRGLEVLEAQAHGVQPLALEAQPPGERGVGAVGRVADARVLERAHVDADLVGAPGLEVHLEQAGEPVRLEGLVVRDAVLAAAHHRELVVDDLVGLFGDRRCIAFTDLARINGFVGHYRW

SEQ ID NO: 4048 - protein, 756 aa, Androctonus mauritanicus
MGIAGDIALILVAAFLGGLIAQRLGLPLILGLAALAGIAAAVFLWPRVRPEGVTIRNPYRRYGVSCAYAYPLTPTDAHHERLSWTVDTCRQVYNHFLHRLNQHDETPAMSALRAELPDLKQWWTDLQDVYSRTLQVVVERLYDNLKGLSRLKEEGYRVGSLNWKAPREFRSFTYSQRGFKLDKKSGRTVLHLSKIGDIPINLHREIPNGTRLKQVTVKQEPTGNWFATFGVETDADAPPKPDEPERCVGIDVGILKFTHDTDGHAVGSLDLSAEEERLEHEQRVLSRKEHGSNNYRKQQRKVARRHADIERKRRDFLHKLSAWYAKTYDFVAVENLDAKGLMELPSNSHNRASAAWGTFRRMLEYKCEREGTHFAAVDPKGTTKECSRCGVETSKPLWVREHSCPACGYTADRDAITAENVLQRGFSAIGMGCAESTPSETATAVETRDGQPSEKDQQCVEDQSDDDDEDGSGQRHLEGVGTPEPGEAVEDERAEARAEDVRDDRGDADHDRPEARVDLARRRGATQWDLRGQGEGELLVDEGAPVSRVAVHDQVAGVLLECLVRVGFDRFLHGGFQGRLHVIRQALGRVYPAPATEFDLLADRLFRRGDVGGIGVPLVVQHREDAHGVALRERLAEPGDRGDRLARSGRSDRGGAAVVRNGRELGAGCLRESEGRRLPDGARARVRDRHCAGLRLRDEILERLDAAVSRDGDHSGRQHDLTPQVVVLRQDVGALRGVEHRDLDGCEPDDVAVRVL

SEQ ID NO: 4049 - protein, 315 aa, Androctonus mauritanicus
MQSGAGTGVTSGGGGAGGGGGSHGGGSAGGTGDDEAPKDPGANIHHQSYTEQDFEGTFYFFVFCHELIYGINKGKEILGNRGFTIRELKVELTHSVLCVPPVPLDAAQRELRRLQRQAARRWIPGLKPNQQSRRWHQIQDRLRRLHTYVANARQDGLHKLSTRLTSEFDTVVVEDLQVAGMLRNRTLARAIADVGMSELRRQISYKTSWHGRRLVTADRWFPSSKTCSGCAAVKAKLRLSERTFHCGECNLVLDRDLNAARNLANLVEATGGTSSQSCGATENEPAGNPRQTSLAGSGYRHGKTPPHHRAGANAA

SEQ ID NO: 4050 - protein, 944 aa, Androctonus mauritanicus
MSEEIQWKLCSATRHLRWLSCGPEKGRFSKKMKKKITQRPARAGHRGTPGGVHGRDGGERVGVQHRVQLRPVADVHRQEPAGRLLPEGGTCRDCGCRDNGDWHRILRCRLLQPDELPAAAVLVLQRPAVRHLHPRHGLETDDADGRLGRPGAGRPAAERQYPRSGAEKTRRRPGHSFHHWHADRALRLDPAGNGNVLHQRGGPGESRGCKPQPVVRDRTDCCRLGLPAVGEVAANQSSGGADPAVGVSSSSTPGMMSGGGPKASRAETITDRPIIPEAGSASSSTVTAAMLPRWAAIRASAPTASRGTPVSGSTKSAARPSNWLALAAHCFWPLAWPNAKKGQGGVVLQGALVAVLGTVGEAHPSQPSGTLIPLHLPHRIGRLLGELQGHRLVQQQRGFSQGFDGQAVPAGDHLFVADRHEPRAAQRPHCLAQFLQDAQFARLGHPQQREAEVLRIFGHRREAQQPLGQAMNQRVGDQRHLLARRGEGRSGGRRGEQFLVEEIDDAFGAAPGQSGQRLRALGHVPFGGAGEFGGQHAGACRQRQQPGIVVEHLLEMRDRPVLVDAVAGETALNVILQAAEEHRFEVGGRGGEGLYGAIRRGDYCTPQCFQGPHELADDHPVRFVNRAAKFDHSPNRDAEFVWNIPQPGHGPNFWIPLHVNPDQRDVWFDLLDGDAEAGELRLLEDPDSWTLHVTVEHEVPEPNNSDEPTYVGFDIGESKLLAGCACRDDGTPVRPMFVDGGRTRHLRKEMHTTLQRLQERDAAEWRTDERFEHYQNALTDIVEKASRKAVEYAQSFESPIIALEDLSYIRERLDYGAYMNRRLHSWAFARLQDRIEDKAREAGIAVEFVAPAYTSKTCHACGHIGYRRKQAEFRCTNADCWVSEYQADLNAAANIAGRVDPWGESLPLKPAGDDSPRDGSAVDSTTAHRERSAKPAQMTLAEWG

SEQ ID NO: 4051 - protein, 303 aa, Androctonus mauritanicus
MSRFAHLSATKFCETYKSNEITIINNQNWNTVDKNGRWYIAFTSNQGKKALPVVETKDVQSYFPFLTTKTREFRGTIELLRKGRRWYVAIPIQVSSDLDLENSHPSVTKPLMDYTSIGVDLGLRHLVVLSEPTSGKRQFFSGKEVGYKRRHFRSLRRSLGKKKAQRAMERVGQKESRWMKDYNRKLAQDIVTFAQQFEKPMIKLEQLDNIRKTCRSMKRADKTIHSWAFYQLKQCIKDRAATFNIPVVDIDPFQTSQTCFACKHAERSNRKREVFLCKKCGHKAHADLNASQNIATSTNLAAS

SEQ ID NO: 4052 - protein, 312 aa, Pionus senilis
MVGPSTAHRPQGVPLSSGVARSTPTQTYTLGLRRVEDKPIALLFLISHEEKFKPFLLGTNVDKFPFHLLENEVSQWEGPSQADSTSLEQEKYLQAVINSMPHYADASGRNTLSGFTSAHMSSSGPKAHKALLGRLRRTSRSLSRKCKGSSNRRKAKAKLARLHSRIAAIRRDATHKATSMLAKTYRRIAIEDLNVRGMARNRHLARSIMDGGFFEFRRQLEYKARFYGATVVVANRWFPSSKTCSCCGSVKTGLALSQRTYTCDTCGPHLPSSLLASLCDRVRQPEEPVRRDITQLHCFNQAMVIECKLRIG

SEQ ID NO: 4053 - protein, 512 aa, Pionus senilis
MEVEQGVGQQNLQHPIQHKLFSDSGFRALETCHNQDFCLPDIVLANATRRSDAIAIARVICILGVVYVHAWTGRNGQDLELLRGSPQEGLRWVLMEIFGRSAVPLLGLISGWLVGGSARTRNWFDHVGRKARTILLPMLFWNAVAILLVSGAAWLLGLSAPVPQSGGWIAEELFIINRNPDINVQMPFLRDLFLCMVAAPLLVRLPNWMLMAVALAAPFIGYPVFLAKLLCFALFACAFNLLIGFTGLLSFGHAAFFGMAGYFAGNALKNWGLPFELGLLVGVVAGALIGLVMGALAIRRQGIYFSMITLALATKTTPSNRWIRANNQVNKYRAKLANIRRDLAAKAAHGLAKNYETVVIEDLNVQAMMTRGGAHKRGLNRAIAQASFADVRRRITYKTRWNGGRTVIADRWFPSSKTCSECGEVKSKLSLSEREYICHRCGVVVDRDLNAATNLAKLAAPKSGVDFHGTGRLPGMGRGGAGKTNSSSGELAPAGEASMARKDLSGRKAGTR

SEQ ID NO: 4054 - protein, 300 aa, Rhinocypha anisoptera
MDYDRDVVEGLVCFNDRYGRYQIDYILVRQRFSNSVFNSRSYPGADADSDHNLVMMKCLVRFKRIARGRKLKKWNLEASTGAKKKEYQETVDSFLRDCSQIGTTEQRWKIFKDGITRAAGKVIERVNQNRIKKPWVTEEMIRKMAERRKWKNTNTEDGRKGSKNRIKAKLAVARAHEKIANSRNDYQHKLSLRLTSENQAIVAETLRINNMLKNKRLSKHIADSSWHSFITKLEYKANNKGKHLIKLDQWYASTKTCSHCETKNEMLTLKDRIWTCPNCKAQHDRDINAAINIKREGAKN

SEQ ID NO: 4055 - protein, 270 aa, Chrysaora chesapeakei
MKRPLRIRWSRRPPSEPSSVTVSRDAAGRYFVSLLCEVDPEPLPQLEKAVGIDLGLTDLVVTSDGFKSGNPRYLERDLKKLRRAQRRLSRRQRESNRYAKQRRRVALIHARIRDKRQDYLHKLSTRLIRENQTICLESLNVQGMLKNGRLARHISGAAWSELVRQLEDKAQLYGREVVRIDPWYPSSKTCSSCGEKRDADDGHSFISEFQGSKSMTPVIGQRAPDGSKQGRDSPTSSKPAKLSFLGSEHMNTYDNESDDSADPGPIGRTA

SEQ ID NO: 4056 - protein, 250 aa, Papilio bianor
MAQRSGYFGFPKFKKKGIKDSYTTNNQKGTIAVTCRSIKLPKIGYIKAKIDREINGLIKSATVSRASSGKYFVSVLFETITQPLRKTESNVGIDLGITDFIVQSDETRVVNPKFLVKYEKKLAREQKILARRRDAAKAANRKLSESRNYQKQRLKVAMVHEKIANQRKDFLHKTSFNLIKNHDVIVIEDLNVKGMVKNRRLAKAISDSSWSEFATMLTYKADWYGKQLVKIDRWFPSSKTCSGCDHVLAG

SEQ ID NO: 4057 - protein, 474 aa, Papilio bianor
MPRTRSSSRSFRPHIASSRTSEQSERDPGLITTAVSSRAGLAAAARNAGIGGYGSRPSPGRLVGGLSQTSWRARCRRALRWCEGVNHGRSFPERSRITVTLSATGKYYASILVDDGLEAPQPIHSVEKVVGIDLGIAHFAIESRGKKKTNPRFLKRAARNLRRKQRQLSRKKKGSANRAKARLIVAKAHEKVTNARSDFQHKYSRTLVDENQAVIVETLKSANMMKNRKLAKHIADASWHSFVLKLEYKAKEQGKHVIKLDQWYASSKICNDCGFKVKDMPLSISTKEGPLEYVEEYVYLGQIISFKDQTAKETNSRIAAGWKKYWALRYIMKNKDFSISIKRKVFNTCILPCLTYGCETWALTASHRARIASCQRAMERSIIGIRRNDRVRNIDIRDRTRVTDILQRIDQLKWKWSGHMMRTKDERWSKEVTNWFPRDSKRSKGKQHYRWEDELKRTAGPFWRRDLVRHNTKY

SEQ ID NO: 4058 - protein, 629 aa, Magicicada septendecula
MNETDDDGELANYVVKHGLRRFFCPLLDPTTRDSILYKIRDDCKVVSRIMIKASWLISTYYTHYFTKRPLEAKNSFKKLDVLNLIYFLKGNARKKKSFYDPDGIIESFCETCTIENGSYRSFLLLEACKKYETEFCTNVTTYMFRRVKKYDYDLRETSVRSNPFAYVPFLFEMQKKRIESNERMFTIFPVYKQNVKHVTLRWDVKRKTMGLYELLASLRVPDKPSALEIREDPQKYWSRYFALPKNFGYSIATDGVSVSKSVVRVVQKKKKQKPEEDDISVNGNDFERIIAVDPGAKTPIVTCTKNKEDRYEYKILRKQRVDHLCKRHVRRRKMEKFTGVTERMIRDDPNNKRELSFKNPETRLEFLRFKLTHFEEKQTRYERSNVVRLGLDKYVRRQKAEHVIVRKMFLNDTKKERKPVLLLYGRGCKFMNVSSFKGHGKFFHDAILKTIRTYYRKELVVRLVDESFTTKTCSNCSTREGFVVSTGGHRYAFCSKCRKGIHRDKNAAKNIFFCVRKKNVMTHTECLICGMSNTFQVSQGNTGSFVEPKEILSKLNLIFNRDAHGTQEDAHEFLLFLKKHFVETNSDRSSFVDRSRNIAVRSVFVSLLSWLRSERVTGLIPNYIVSDFN

SEQ ID NO: 4059 - protein, 887 aa, Magicicada septendecula
MFQRVKKYFRGEYVNEDDPVAELFKEYDLQDTSVRSNPFAYVPFLFEMQKKRIDRKQPMLTVFPVYKQAVKHVTYTTMGLYELLASLHLPDKPSSTEIRDDPQKYWSRYFALSKNFGYSLASDGVSVSKSLVRRVQKRKKQKIEETNNTVINYDDYEKVIAVDPGAKTPIVTCTKKGKDTYEYRTLRKQHVDHLCRKYVRRRKLEKFIGGIEKSICTDPENKRELSFKNPETHAEFLRFKLKYFEDKQKRYECSNVVRLGLDKYVRRQKAEHTIVKKMFLYDREKTNEDRKPVLLLYGRGCQFMNVASFRGHGKFFHDSILTTIRMYYKRDLVARLADESFTTKTCSNCFTREGFVVSTGGHRYVFCSKCRKGVHRDKNAAKNILLKHTLIGLHSSTDQGMSPMDYLHTDDLNAIQTNERDKSVTAGKLLNLPMNSDSFNFLAESVRRPKIAKNIYEVRNIIKLRRKLKQISKAKTFVGFHDDRLKNSKTLEPLEKQKNKETCPSPVTDSNILKHTVHKLKGGGTECPQNKNHSKKCGTNTVLDSDHSSVHTNSMYAKNKNGLCKNVQKTIINEFNDYLGSSPSFCVTEKNCVQYSQETETKNINNMNESFNFIKKLPIQSNVIDSVHDVCVAVNRPTVTFETCTTIESVPYDTPASVARVHCKSVQGKKSPSRQRKHMPTVKTSPVRKHVKKPKSIQKGQYNITACADVELTHNVQNVTQTPASTWNSNNPDSPLLDESLHTHLLKVCKPLHTYMRNVHKKPTRTYTRRKVNKVNTNDIINSSVTNDNALKTCVFLVSESLNSIDANCFRKLRKNLQIQFDFSTSKRLYKMITKLKIDCERFEWNLSMQTLSRCALMKTSKLPNFIHSPACDKDLKESFAKSFGKQ

SEQ ID NO: 4060 - protein, 801 aa, Ostreococcus mediterraneus
MRRRWRRMQQLQSQIAQRNWSRERHKRGPKYRRTRKQYARTTRRMKATLKTRHLEFXQWMRWVHRSVAKTVAARYDAIACAPLDLKHIFARQLNDTVVQRVIKRRSRRVTHALSLRRCTEALKYACAQAGQIVVIERAIESGTSKTCGNCGWENDALGHAKQFVCHMCDITIGRDWNGARNNALQVLADGGFGMRRDATSGTSGVETTGDDGEWLPAQHEDFTDDAVRDAVEESDVDDEIDSENVSNRLARWRNVKVGQELGARRAALADALRQAIQSVAPTKIHPHQRAAAMLLXERFCSGSPGTLFVMDCGLGKTHTMLLVAGALMTCKVRVVLASENLLASECKRVFSELWPGIDPMELNVIVSGHHAIHKTNAAEAFAQREREDAIFILDEASRYSDESGAMYEAIGESVASGYQPFRMLVTATPFTSNFTKLSNLLSLTGIVGDDERDEFKEQLMCAARTFRNAIAQLFQDHRVGVSEGQVSYSRFLRELTKLAAGTECSVEFLFNGDSGRAHSQPRQSKKSKKSKKNKKRATRTPGGGLQFKTLHAQNDAERAVLAGIATRHATPTMTPEVVAQNAAQAARIKLGIERAQSALDRGETWLPSTSRGFYFFYPKNTSFDAPVRRMMITASSLSGTTFFPKRPVQQNAFMRTGVEFEATALKHIQKKYGFDMVNGVDKWTRALPSDPTVLAATLDGLTTQGIIVEVKFVHNFMDVLTPAGATKKYNLYWPQVQAQLHVFELSLAMLVFYSIDADTDDMFSCEYWIHRDDAWLDRMMPKFDAALDAQRKRHNFDPSSL

SEQ ID NO: 4061 - protein, 739 aa, Ostreococcus mediterraneus
MPDGSVAVHGVAGPSSRYGARQIVDARAVAADEERGHVHDAVVDAHAPADDAGAAPEGPEGAVACPVVHDDFAPSAPVIAAPQPVRIRGRGHERRLQIAALNHGLKSTTQFWEGERLKVRLYNKIPMPRCAARGETRVGNWTAPVYPLDEERSAVYERDEDTTIQMFEALERIADGPEERGDKLHAFIQRKRPLHGQLKTYRCRAYPRAKQAKILKKFCQVQTFDAYNAAIDVIKEKPSCSLTWVRNRVKAALNRDKRDVPCHVMEAGVIEGHNAYLSNERKRLKALHERNERFRYELKHRSPKTTPVVRCTFGATRSGVKHVDRDDASSRTVRLDFARGAHRTSAFRELGVVKVREGALGDLEDKFNFRVTNSKTHKIYAQKENIGFEYDSRRRRWYLVVLYDAPAPPQKKTPAECVDMAVFDLGVRTPATIFSPITCDVFEPYPRELREHMRRRWRRMQQLQSQIAQRNWSRERHKRGPKYRRTRKQYARTTRRMKATLQTRHLEFAQWMRWVHRSVAKTVATRYDAIACAPLDLKHIFARQLNDTAAQRVIKRRSRRVTHALSLRRCTEALKYACAQAGKIVVIERAIESGTSKTCGNCGWENDALGHAREFVCHMCDITIGRDWNGRCLLQFAGRDSGKPAGLVDGLFCYFQNEQWTLQLGETYLPKSSYVQVRLYIKKKANFRVWSILKLVYHVSSKIAVNDRRDQRADCPTNEESDVNRVIVCFPSKCWVYIR

SEQ ID NO: 4062 - protein, 289 aa, Cyclina sinensis
MYVRTLTDKDKCRGPRSRHIVIMKKNFGAPIRINKSVDRIPTFDHDIRIIKRPNGKFVMQIPCDPIWTRRNASSDNIEKHMCGIDPGGRTFATVYDPIAKTAYQVGTEEDKRFNLRPIHDKIDETHWHLTNAQKRNQPRVAEERQRQLKKLHLKLKTFVNHIHTTLCSHLVKHYEMVSLGKIKISSIVKKEIGKKTIARRAKRDLLCWQHYQFRERLLNRSVGTDCEVIVQDEAYTSKTCGYCGVRNDKLGASETFYCDSCQYSTHRDINGARNILLKSLRMFPFASAV

SEQ ID NO: 4063 - protein, 480 aa, Cyclina sinensis
MKRKRPDISLWDACHVHEHGTMWRWWKSIRRKDFRDRDNVRSDCIDDVNVIKAMSGVSKEPKIENKEKKFLTTFSVGLKPTPHQRRVLNLMLKVTNYTYNWCLYLVDEMNMQSNQFELQKTVCKTNICDIDPAYRLPNDDWFFDNKMTAIKTTACRTFCSAYNTAVKRNSKLKTKREVNDCLVQGSIGIQKQFVRTLTDKDKCRVPRSRHIVIMKKNFGAPLRVNKSIDRIPPFNHDIRIIKRPNGKFVMQIPCDPIWTRRNATNDHIEKRMCGIDPGGRTFATVYDPIAKTAYQVGTEEDKMFNLRPIHDKIDETHWHLTNAQKRNQPRVAEERQRQLKKLHLKLKTFVNHIHTTLCSHLVKHYELVSLGKIKISGIVKKEIGKKTIAHRAKRDLLCWQHYQFRERLLNRSIRTDCEVIVQDEAYTSKTCGRCGVINKNLGASETFSCDSCDYVTHRDINGARNILLKSLQMFPFASAV

SEQ ID NO: 4064 - protein, 1980 aa, Cyclotella cryptica
MRQSKSIFRHKCSTMSTSSDNSLNPLQVNASVPAVRRCWHVSTKMYTKQRRYLAMILFVSTLSMLSRTTLAFTASPSTMITLFRTKHACTSTHRTSNFGTAASRNWGILTAQSSDQDDAPQQDDGDEEEWDSPPIIDGFDLDDNDSSYLSEHVLNSMTVTQLKQQLRLRGKKVTGNKAELVKRLMDRGVHSRMVDMEGSPLPAEDGVSSRNKAMETNGSTEGKESKRVIEAKAKGADIIDVTEFVEAEDVGKSFRSSHRNAKSEYDDAIDVDTSDKDGSGNDSSSSVSSPEVWGEDARIVEDYEGRSVVVDGLSRTVIEYKGSNDTIVQAYVVGSRDSLAKFLRGGQQQDKSHQDGEAKSSATKYSSIEEEVYAIQRKRELENKRTLPREDEIEGEEDEDDPGTPYKTIERDPGDWGVFTPTGAQLSSSEVQGVLLLSDVYGPFTENTRALADKIAFECQPVVVLAPDMFRGKPWTQNPITGEDGVERNENRKTYEEWRAMHPERRVDVDIRAAASVLRERYDVASIAVWGTCFGGGRALEAASGWYHGGPESYYNDAFSDRPPPPHVDPVACIAWYPTRYDAKKLFGKENEGFRTFENGNDRDVAVMAVFAEHDSLPGATIEDATLLKACLDEDPRVKDAMVKIFPNQNHGFAHNLAHKKEEVIEGSEPYDLDSFTLNDGYDGSCDAEVACLLSTAWMETYTRVFLPTVGSPVRFDEDESWSTVQMSPYSQKEKRDIRKELEEAIANYEGIEIDFNRMSTSSSDFLDDIPEQYKEIEEEREKIKQMLIEKYHMSPDDEEEVFERKLQQAIDDGALNSVMLDAYLDGDAYXSMFKIDPALMFPGYRRICAQASAKVVQTNVENIVCETFFMNATIATFLDCHHLKRSGNVNIIRRLICGCEPTTFTLDAMVAIGGYRFVQRDKYKAPNRRLSDESPLEKFVWRQKKMLREGATNTKHPISETWIKKNMERAFFYQLLTLKYQQYDEVTNQPDTESKKWNIVPLQSDARPNIVINNEILYFIGAYANYFKNKNLGKLRVLLNGLLKLKTVQDAVMKSSGFHEVLWDVMFHRDIKTALKANRTNAIGIVKVFYDQDPGVVHQQNGPTHQHEFQHLVPGGNPIDDTKREVFGYYMKTEGVVAHVNFWVLKSLDAIDNNMVQKIGPKFGKDLHTRQIKGLLERGYPEEPLSLAVKVGKTKEEGKAWRNTNKKKKRLYKKVMMKIDNAQDPGLIDIVHLRNQDGKFEFVIKSTEFRDQAGGNDAKKKTDNWRAKAKLVEVDACHSTNYSKVSTLHGYTNFLKHEHFNLVNEHITQAMNSVQFYGTQGNFGVSRKEMTKQKYTVNRARSTVKKTKFFSKKMDALVNKLIDLDGCGSYPLVFYGGAQICSSMKGIRSGGVPTATMRKLFEDHFDCEVTDEYYTSQICCDCKAQLARNRFKSRDGNAARNILAKGQYFLEHGSMSDKSDSTVSVFSKRMGGDEGALGLTGIHLGVFGNRPVWPLAFHELAMATNVGRLVADRVRRLCSTTSAQISGGFHGYYPVRHIYRKLVRTKPLSNDGIKRMKEIFNDLLHNNDISKFPTKSECKELKNVYGLTSKQILDKFCKMSDAEAASKRRAKAKLVQTKTCVPLIPSGVGYPFENCLIKHTNIVDSMEGNNVKRRSSYGTHNTRKCNCFSLGQQSVVSFQQLFDESQDFCRNARSIVDFSIQTLPDSEISIHVRECTAANCENEGDCGNKYVNRPTHLWKCVIALQFETNRQTIQGLRVRKGYSIPEWAVIGEYTGKVTSKKNRNKDSRYIVELGSMDTVFVRSIKPINENEFVTIHYGSNYHEFFDCCLWEEIVELGSILSDLFLLVGGIAEIKLPRLFDNIEQSLHHSGYKQSHLQLGAGDFIGEIGFFTESPQIHSVLSVTVCKTLTVPHSTYKLLAQDHPGSVAKILQNLLAMVERTSMQAQLPRSLEELRVGSNLFYMSGSYRAISLMIKQMNAL

SEQ ID NO: 4065 - protein, 1184 aa, Cyclotella cryptica
MLKDSAIEDFITNMSMLKQLFEEECIDTSELNQEDIQRIRDKDPFMYHSILQNFRKMKSLSVAPDRDGVDDELGWESHCPADTAAGLPISRTNFWQTAAVDDNLDPTAQASNDQTSTSSEQSISPLRFSSSSQQASSSSSSSSSRHHTVTDGRELHPGLTAERDWSNTVHQFNLRKHLMTPTAKDSREGIENSRRLARNAIKLGIDNETHRKLVAQNPPGGIVQEFDQDLPLPKDGPRVSIGGTSEALPFGDGPGYFPSFPSGTAGFWKDGEGPKAMWEVVACPVADVEAFLENPLRCVFGGDDGSILDFFSIINGNSIQDAMTDAIVPIAVEFIWVFSGLGWIIRVRDTSFLKLMQKASNETNEQFNQRRRLVLNFVLKTTNLVHLVTKQAYEKINLVARRAFIERISLKDIGFNIFGNGSTQCYENICHPDLSRLNIVQLQPAGRWLFENYGSMFKIDPTLMFPGYRRICAQASARFVQTNVENMVHETFFRRMHATIATFLDRQNLKRSGNVYIIRRLICGCDSTTFNSVALDGIGGYRFVQRDEYKAPNRQLSDESPLEKFVWSQKKMLREGASNTQHPISETWIKKNMERAFFYQLFALEYQQYDEVANQPDIESKKWNIVPSQSDARPNIVINNEILYFIGAYAKYFKNKDLGKLRVLLKGSLKLTTLQDAVMKSSGFHEVLWDVMFHRDMKTALKANRDIPDVAIPGDVTFTIDVSQDELPLVIEGTDEIGTVKVFYGDNPGLGHEQNGPTHQHEFRHLVPGGNPIDDTKREVFGYYMRTDGVVAHVNFWVLKSLDAIDNDMVQKIGPTFGKDLHTRRIKGLLDRGYPEEALSLAVKDGETKEERKARRNANKKKKRHHKKLVEKIDKAQGILDNYDGNHFCLGLDPGLIDIVHMRNQDGKFQFVIKSTKFRDQAGGNYAKKKTDEWRSKAKLVEVDVSRSTNFSKVSTLHGYTNHLKHEHLNLVDEPVTQAVSSVRFYGTQGNFGVSRKEMTKQKYTVNRARSTVKKNKFFSKKMNALVQKAVEFDGRGTYPLVFYGGASIRSIMKGIRGGGVPTVVMRKLFEDHFDCEVTDEFNTSQICCDCKARLEMCKNEEADEVSGFHKEIRGVRYCKNCPPRNRFKSRDGNAARNILAKGRYFLEHGDNDPNYEKMNGRMAIKRVKHYPIDPNRPKMQMKT

SEQ ID NO: 4066 - protein, 844 aa, Cyclotella cryptica
MVVRNNDTGCPDNRIICVRDASFLKLTQKASNETNEQFNWRRVLVLNFVLKTTNLVHLVMNQAYKKINLVARRAYAERISLNDLGFNIFGNGSTQCYENICHPDLSRLNIVQLQPAGRWLFENFGSMFKIDPDLMFPGYCRICAQASAKVVQTNVENMVRETFFRRMHATIATFLDRHNLKRSGNVYIIRRLIYGCDSTTFNLVASEGIGGYRFVQRNEYKAPNRQLSDESLLEKFVWSQKKMLREGASNIQHPISETWIKKNMERAFFYQLFTLEYQQYDEVADQPDTESKKWNIVPSQSDARPNIVINNEILYFIGAYAKYFQNKDLGKLRVLSKGSLQLTTLRDAVMKSSGFHEVLWGAMFHKDTKTALKANRDIPDVAIPGDVTFPIDVSQDELPLVIEGTDEIGTREVFEYYMRTDGVVAHVNFWVLKSLDATDDDMVQKIGPKFGKDLHTRQIKGLLDQGYPREPSSLVAKDGETKKERKARRNANKKNKHHHKRWRRKLTRLKMENLSLSSRAQSTEFCDQAGGNHAKKKTDEWRAKAKLVEVDACRSTNCSKVSTLHGYTNFLKHKHFNLVDKPVTQTVSSVRFYGTQGNFGVSRKEMTKQKYIVNRARSTVKKTKFFSKKVNDLVKKAVDFDGRGSYPLVFYGGAQIRSTMKGIRGGGVPTATMQKLFEDHFDCEVTDEFYTSQICCDCKACLARCVNEDRDEESGFRKEIRGFRTEIKEVEYGPDDMPTTIGLYGGNYTIVFHPGINFMDRLADNANLMVHFHAGDSDMSEGEYERRQWSEEDLCPAEEGRFFEPFLSGTGNSRRDHRLIATQAVGQKRKTDAMGCVNDKMSSS

SEQ ID NO: 4067 - protein, 865 aa, Cyclotella cryptica
MVGRNNDTGCPENRMIRVRDTSFLKLMRKASNETNEQFNQRRRLVLNFVLKTTNLVHLVTKQAYEKINLVARRAFIERISLKDIGFNIFGNGSTQCYENICHPDLSRLNIVQLQPAGRWLFENYGSMFKIDPDLMIPGYRRICAQTSARFVQTNVETMVRETFFRRMHATIATFLDRQNLKRSGNVYIIRRLICGCDSTTFNSVALDGIGGYRFVQRDEYKAPNRQLSDESPLEKFVWSQKKMLREGATNTQHPISETWIKKNMERAFFYQLFALEYQQYDEVANQPDIESKKWNIVPSQSDARPNIVINNEILYFIGAYAKYFENKDLGKLRVLSKGSLKLTTLQDAVMKSSGFHEVLWDVMFHRDMKTALKANRGIPDVAIPGDVTFTIDVSQDELPLVIEGTDEIGTVKVFYGDNPGLGHEQNGPTHQHEFRQLLPGGNPIDDTKREVFGYYMRTDGVVAHVNFWVLKSLDDIDNDMVQKIGPKFGKDLHTRRIKGLLDRGYPEEASSLAVKDGETKEERKARRNANKKKKRHHKKLAKKIDKAQGILDSYDGNRFCLGLDPGLIDIVHIRNQDGKFQFVIKSTEFRDQAGGNHAKKKTDEWRSKAKLVEVDVCRSTNCSKVSTLHGYTNHLKHEHLNLVDEPVTQAISSVRFYGTQGNFGVSRKEMTKQKYTVNRARSTVKKNKFFSKKMNALVQKAVEFDGRGTYPLVFYGGASIRSTLKGIRGGGVPTVVMRKLFEDHFDCEVVNEFYTSQICCDCKARLEMCKNEEADEVSGFRKEIRGVRYCKNCPPRNRFKSRDGNAARNILAKGRYFLEHGENDPNYEKMNGRMAIKRVKHYPIDPNRPKMQMKTREGPRRRHPR

SEQ ID NO: 4068 - protein, 1366 aa, Cyclotella cryptica
MANEPQSTQEATQRVVKILGANYKKADLQSIVSTNCTHLSLQDQNMLLELLTEFEELFDGTLGDWNTEPESFKLKEGAKPYHGKAYPVPKSRKETTIKELNRLCELGVVEFQPASEWASPSFITGKQDGTVRFLTDFREVNKRLVRKTFPLPKISTVLQELEEFTYATTLDLNMGYDTIRLDPDSSKIYTLIFPWGKYSYLHLPMGISGSPDIFQAKMSTLMGALEFVRAYLDDLLCITKANLEDHLDKLKMQKKVQAILAISSPKNVKDLRKFLCMVQYYRDLWARRSEVLAPLTSLVGECGHTKVTRAIKTKKHPWYWDTVHQKAFDDVKTSIAKDVVLAYPDYSMEFEIYTDASSKQLGSVITQGNRPVALFSRKLSTTQQKYSVTELELLAIVETLKEFKGMLWGQRLQVYTDHKNLIQDTLGLTSDRVYRWRLLLEEFGPEIVYIKGIHNTVADAISCLDIGPIPSEHKNWMTFTKCWCHYTMQEESAIDTSAYQEEMNLVFANRSEEDVIYLLTPYVTHMGSRVSLPVSRIHKRMQRVHQVISSMLRTAEIDMAPSVETSDIDKFVTNVAWAIRSTYHTVLKASPGAAIFGRDMLFDIPFLADWNKIGEYRQHQTDQNTERENSSRRDWDYKVGDQVLLRKDGILRKASNETNEQFNQRRGLVLNFVLKTINLVHLVTKQAYEKINLDLSRLNIVQLQPAGRWLFENYGSLFKIDPDLMFPGYRRICAQASAKFVQTNLENMVLDTFFCRMHATIAKFLDHHNLKRSGNVYIIRRLICGCDSTTFNSVALDGIGGYRFVQRDEYKAPNRQLSDESPLEKFVWSQKKTLREGASNTQHPISETWIKKNMERAFFYQLFTLEYQQYDEVADQPDIESKKWNIVPSQSDARPNIVINNEILYFIGAYAKYFENKNIGKLRVLSNGSLKLKTVQDSVMKSSGFHEVLWDVMFHRDIKTALKANCNIPDVVIPGDVTFSTDVSQDELPLVIEGTDEVGTVKVFYDQHPGLAHKQNGPTHQHEFRHLVPGGNPINDTKREVFGYYMRTEGVVAHVNYWVLKSLDAIDNDMVQKIGPKFRKDLHTRRIKGLLDRGYPRESLSLVAKDGETKEERKARRNANKKKKRHHKKLVKKIDKAQGILDSYDGNCFCLGLDPGLIDIVHVRNQDGKFEFVIKSTEFRDQAGGNHAKKKTDEWRAKAKLVEVDACRSTNCSKVSTLHGYTNFLKHEHFNLVDEPVTQAVSSVRFYGTQGNFVVSQKEMTKQKYTVNRARSIVKKTKFFSKKMNGLVKKAVDFDGHGSYPLVFFGGAQICSTMKGIQGGGVPTVVMRKLFENHFDCEVTDEFYTSQICCDCKARLARCVLVCISS

SEQ ID NO: 4069 - protein, 269 aa, Hypothenemus hampei
MKQEIDDTDDETEKQSHTKRVRKKRKLLNFVYYLGIDPGVVNCVGVCLHSKEGVLKPKEEKGEERNYYLKSATSEESGKWCNEHIQRFKRNKMMKNMKLLAGRNERNKDQDVAFTAKTSHKYEANLEYIKYRMQFFQGSQREYSRRRVTRLKFDYYIRRRRAIDKLELELPPSPPRPRPRPPEKNNEDMDDEAGRPPEDDTEDIQIIEDEPARPPEESNENRKPRRRGFHRYAVCKTCHIVWNRDINAGRNMIMVATQDDVNYRKSTSQ

SEQ ID NO: 4070 - protein, 934 aa, Chlorella sp.
MHSRRASQHRWWLTQLLCLLAAAQSLGCQTALAATFLYFLFRKACNPTDEAEEGPRPAMDVPPDHATITAVKTEHHMCTPGGEEAGWGRAAAASMQDQERPSHMQIFVKTLTGTTIALNANVDYTIADVKAQISDRDGTAPDQQRLLFGGQHLEDGCTLGDLNIPKEATLYVSLRLRGGGVEGDGCGAQAGRVEAMEGLEEPPLRQQRGHQVNDGTDEELRRCLPLVEALAPPGRAPDADAAAQAAAEAEAEAEVEAEVEAAVAAAAEEEDPEAEATAAAQAQAAAETPAKLQRFTIVTGLLSVLKNRALRHPINEAVRDTTLVKYETLTLLGLYVTHYCKEARRRAAEGLEALPAMPYLGATFISHCIRLVTHSDEAPRWNQLPPDELLLSVYHHLYLPSRSNNLRRVNRDRRSEQLNSLAIQLAVNVQLHVRLNFQRFLRRWCSMRLYQDFGEHQPSPRGKVLDRMVNSICAEQCLNTDLPEGLSAAQRAWVQALVTSQRAAHTTLLPADTRELRRQWQKYLPWLHDMLLDIEAYNLQDLRRKRKKKKKKRQQQARVEAAAAPTPWQQPRVAPFSLMPVAAFTPCHITLNSGGLRAMVNTLGKKTKAAGGRASGEKRKRDRAAGGGGADEATAEEHKQQMLLREVELWDAHFDMRPLCTVNHKFALYLTTDGTQASVHMKRPAREPPAPPSLPMSLVGKQLLGLDPGRRHFYTAVSDSDSKEHRDVRRCSTGHYYERAGFTARQRWMERRLAAAGLQGWQSRIPRHATADLAAQQQRVAYVTERLEELVMHYCSAPWRKKKWSVRVQKQRVLANEVRRLTGGRPKEQVVVAFGDGTGGRGGCIKGSRMPPIKQFRQLLQRFATVLVIDEFLTSQRCPRCEAQYTSRVSYAVPVCNHCGTHWDRDVAAAKNMLRIARAEAAGLPRPADLRRGG

SEQ ID NO: 4071 - protein, 358 aa, Graphium doson
MGQAMTVKLKLEPNKAQLELIKLASQEYINVINTLVDEMVKSQAPTQKTTKDIDALINSAVKNQAIRDAKSVFKKAKKTKYKTVPVLKKPIIVWNNQNYTINHESVKMPFVVNGKSQRIEIKANISDYERGLIKTASKLGTLRITRKGRKYVAQIAIERNVKEHTGTKIMGVDLGIKIPAVCCTDENKVKFVGNGRNNKYVRRYHNQRRKKLGKDKKLNAIKKSQNKEQRWMNDKDHKASREIVNFAIQHNVGIIRLEKLANIRKQTSKSRKNNHSLSNWSFYRLAQYIEYKANLVGIKVEYVDPKYTSQLCPKCSRRNKSKDRQYKCSHCGHLDHRDIVGAKNIINAPVLDGDSQVA

SEQ ID NO: 4072 - protein, 348 aa, Graphium doson
MLSMLNERYLNNKDLKMLSYSTLSSLIPQLKREYAWLNDVDSVAIQCTVKTLSETFDRFFKGFCRYPKFKSRKNNRQSYLSTIRGNNIRFNHNQRYIKLPKLGWVKCKSSLKHIENERIKSVTIKQNATGQYYMSVLVTSENQALPKTGKYLGIDLGVSDLAVTSDGQKYRSQKLHLKYQKQLHFWEKRLARRRLKAKAEGIALADAKNYQKARQHVTRVHEKIANTRKDYLHKITTELVENYDVIVIEDLKTNNMIKNHKLARSIASQSWRQFRVFLEYKCAMYDKQCVVVNPYKTSQKCSHCGFDSGKKDLDIRKWSCPKCNVEHDRDINAAKNIMHIGLEQALVK

SEQ ID NO: 4073 - protein, 385 aa, Graphium doson
MALYTYKYRLKPTEEQKQLLSKHFGCTRFIWNYFLAQRKDHYEQNKEAIKNKTIKSPNRYDNQFDLVALKKQENYKWLQEVNSQSLQCILRDLDLAYKNFFKQTHRYPKFKNKNDKQSFEVPQHIKQNANKIIIPKFLKGINFIQHRPCIGQIRHITIHKTPTDKYFASIVVEKERVIVKTDKRGHIGLDMGLIDTIAASTGKKIQNPKTLSLYQNKLKYQQRQLSKKQKGGKNRNKARLSVAKTHEKITNSRKDFLHKLSTQIVNENQVIAIENLKIKSMMKNHHLAKSIGDASWYELRRQLEYKSKFHNRQLIAVDPKGTSKECSKCKYINRGLNLSIRSWRCPKCASEHDRDINAAKNILNRGLLAVGTAVKKRAELSLVGG

SEQ ID NO: 4074 - protein, 705 aa, Anthracocystis panici-leucophaei
MGSITLTNIPRDDLGIGRGPDIYPFYDSGLSQYRLLSRPDQRRMTSVASHSPADTALQHCWLNTKVSTFPSPGWPFETITVIDRDATSFPSDRGRLDPVDIDTEVEAALAGPESDLPNERDLYPLISNSNCLFVKKHRFLKLAPTQTKRNAIDQAVSAKKALITRFTNTPEHLRGPHVNTIRKATKKADSQRGLAIYFAKGSGSISFRMDGTDIVDLALEVAPDCVKRAGGTALDSHVQIHLRGQGQRRFLLEHCLQKPMANGRVKYEFKHEWGIQLDRYGQWHLLFPFDVPTPPALNVSEKTFHGPVVVKGCDPGVRTPMTIWNSSEGTAMEVGCPDDGERLEELRRKMRKLNTRCAQRQLPLVEQPLPARQPRPARNQQQQQPPPAHARQPRELRAPHQRPPQPLTPFALPSSERRKLRVRSKRIGKHIHNLVRDVHSRLAHDLAATSDIIIMPWMEVAKMVRGRQLSPAVKRKLLGWRHCEFIVRLAIKCMDTGTLLLIQPEAYTSMTCGSCGTLNRTLGTITYAHEQIIAAAIDSDIANYSATNTKGQNALAKRHPRPRLPTHLRLRSTMLGLKARMAIIDNSGGLIAECVNVLRNKTTQGLGRVGDEIVVVVQKARPISNTPGQASTQKVRRGDVRHAVIVRTKKEMTRPDGRVIRFDDNACVLLNNKKEPLGTRVNGVVTNELRAAGWGKIASLAPKVI

SEQ ID NO: 4075 - protein, 286 aa, Apophysomyces ossiformis
MDNQALGRLMCISGLRDTLSPVKPDEAREAYFNLFDMSKIGYRTIEDLETEKVLFWDKIRTDGTDVEFIFKKYKAPYDPKKKPLTPSDMKGKFDDALIWGVDPGVASAFVAADGTHGSRHRVRSTSTEEYYSLCGFNHASRVREKYNKQEPAIKDLIDKTPSLKTSDLEKLIIAIRYCIQHYDTISEFFSRNQSSDSKENTCKSSDSKWVPLSANDRPEEKEKPIIIAYGNGAFSGSMKGRKAAPTKAILKELQQKARQRKASTFVYLVDEYLTSQICPVCQKQNL

SEQ ID NO: 4076 - protein, 497 aa, Apophysomyces ossiformis
MMFDILSELEGSEDHTLRKELPFPTKNWLKRRFCTEMSTCDSLSSRQKAKLVSYIRKHITDVVASLPKCIRTQEKIQEDFPKLSTEDCRYLSRFCAKITRKILRGVFAPKIGQADQKLFPLMPTLASISPLVSQRRNPLEAFWAVFDVSKVKTLKTLESAKQSTDQKLWSVATDGYGVSFTFARKKDEVTRDTDASSDSDEEPDDDIEDQGQEEVTTADFRDSLDDYEVKGVDPGLTDVFVSCNGHGKESYEVIKASTKEFYHLAHYHTSRSMIQQMEKGESGDTEHRKKIPSRKTTKIEVLERYILYMLQYRRASIASTISDLPVSGFGANRYIGRQEATEEFASRRSTVEQKNNLNRRRHRLQRRMRKSKRRKKSQQTQRLPVSTLYWQPTYKWKKATPTRSERKSLVAFGNVMFSNTMRGKKDGSGVDNLPQAKGERKARSLCNNRDLRVQNVENMLQLWSGKFNERQMIPVSIVTRCTQMQNLQYCVEPRFEQ

SEQ ID NO: 4077 - protein, 300 aa, Apophysomyces ossiformis
MTDGCSVHFQFSRAKSTQRHSEEPIRLHGLNTNEVGQFYRHVAVDPGIGHLFTASYGHGEEEHEIRQCSTAEHYVITGTGLRNHALDKEKQATGMKDIVSKFPMGKTTENDQYSKYVNYFFTHQDAICSFYHSGRGHSRFDNYQGRQRARGEIANILVHGGKKFLRSNMFDTVLVGLQNQLLGRQREIEDLLVGRRQKEKLDNDDKVPVVGFGNGMFGKGQMNRTLTKLETLDDVTDRSVLDCKTCGTLWNQDVNGIKNLFGIAVSVWSTKKRPALFSRHLTDKTRTNITAANAVFSGGI

SEQ ID NO: 4078 - protein, 334 aa, Apophysomyces ossiformis
MRAAQRWIDYLQHYDAVVGLDFGEVCAAASVRRPREPGLYGSQLTIKRGYLYREYLRQLKTNDGGLRLWKFYFNRSVRRRTRDNEISQRSCLDKACYLITNQARRTFDMNHEMDDNRRCVDEPRLVYAFGLDGMSRKSRRGALAPMDHKIANALYRKVNQKNRNKDRQHADVCTRVDKYLTSKVCCRCSKEGQDRRVDFLRRPPTAACVNCDRTCHRNVNAADKQASLGMVVTTTTTRRPIRACQTQTIVEPPRPQERTRRREKEDKNHSELQAFTPDSDLKLGSPNAPSEFARCDFKVWKYGTAKYMYDIRATRRIEAGENAFPTITPLKPNP

SEQ ID NO: 4079 - protein, 599 aa, Apophysomyces ossiformis
MDLDTQILENVSEPESGAEGQASLASGGLHFGSSRRNESCNLHLRRWVEHCEDDTTFSFPPIMDRIFCRRAYKTVGSSVFQPGHEIWEGHLQETFNTYYDWLRKDSAALLVKDFYNIPRTDGAMGCALCYMAPAIIQTKRATQLVIHHRPLPETLWQTMPLREEVVDFYQVQYDLYHEFLADVEIEEVDPEEKASWELFPNIIVYLYRLHAYAKELNGKQEVFTAFSRFNLFMRNMGIRERFWESLFNFDRCQKNRHRWNSDSAFNTGRAPYENAYFFTTNDVAANLPSSPRDIRLLPRNRDLSRWTRGIYHLNKNPVGLSRERLLGSRIMGLDPGIRSMFTCVDTNESMRERAFRESHTASVSNGQYQKQSMFSWEKHKELQCRETADVEPLHNYTKSYCHRERLMALSRARKVALSGLENKIVHKIKPCDDLPIKTSKSNGKRNPDTTERDGRPVIIAHGDADIRAGSKAPVLLVDEYNTSKVCSSCDETTEEYRAATLRCHHKYDNQCKYEEVPTFFILALNDPRSVVYPIRVRQTAHVEDGPTVGTVFWNRDVNAGKNIRCTLVRYMESDHDLGSRPESLQRGTRSEQEPTYLEN

SEQ ID NO: 4080 - protein, 278 aa, Apophysomyces ossiformis
MFRSLATDGYTAAFTFSRRRQHLTEDKKSAKTMKDFQGDLHRFDLIGVDPGITDAYVASNGHEKYSHEIISSSTKEFYHLAHYNASKAIMDRMKNEKPKIQQIEKDMPSAKTARISQFDRYARFLLLHHVDITPILRQKVCKPPFLAASDEFAERLISGGSKYPTKNTRNQRRHRKQKKKRRKRQNKTKARTVKRTKISDTEPSRRRLDSSLKNRSRTSCRRLPNTFARNKWLKATQHPTKRKPLFAFGSAMFNRSLKGIRAGISNIIRRKLKENEAR

SEQ ID NO: 4081 - protein, 1060 aa, Apophysomyces ossiformis
MSRPKKRRLQYDDMPQASDYIPLNSVDDAKNALTAEFFDFVISSIHGLQQAHDREVADDDPRFWDRPDEKLDDLHNRLLAKKRVPRGTLQKIEDKAGLKRNSFGNKFKQQFRFVDLWKEFVKSEFQTCRQTAYDDYLSGRSVQSQPNAVIAPKNEQIRTCSTSIESILNIDIKKDESLKKRIISKLNSTSVQATDLSSDLSAIVFQTMLKLAVGSGEEADWPDESGQRLPFTVSSEVVSQYGTNFKNMWSGNLFTVLLNHVLRILLRLHLSPGREHKYVDMVAKKAEEKLEKQSLTKKCTSEKKNLRDVVRREKHKISKLRKKLQSEKDTNIKKKLERKISTSEGRLKYFLVKGTKTEMAYSGEDSRLELLLSHLPQHEALEMIMEDSDDEDSGSNGDMQNLNKGQMSKQPDKKKRKRNPDTYSDDKETSRRKQRSIQAVLRKLLLVDMKGTLTADVVNSNWDGEDLTTKEMDTVLLIYRNLHSFVPVAGNKAPIASQIPFVLLANAILRATGYDKFTRSVCPYVRPSQIHAIALDSCAIYQLFGKRQALGYKRAVFGSLFDLDAVDRICEQHGLQFRERITITSFKTAIITGSTSGKKRRPESSYESRKKLRRNRQPQAALKGSQAELKTDIQKLTGLIKQHEANTKRISREVTKEGRDVTESKKEIITLSRLRAPNLSKKKSDMISRLRQAKRTRAEKQLALNTEKRKLSDARARKYQARKALEMLQQKDKKKRKKAENSEPDDSFPTLQKPGCEDFAQHMKLDKLPDSSITYAGTDYGVVTMSTTVSIPPPRYNFHMELYNRYQTLDGSEDKSSIELDTDKKRFLQLPKPFRSTAADLDWTTRSRAARKSRERRKKTTPEGRAVVKAEKLLSENSIKWSNTVAQANERHKRRKTLEERKHVLREGGEGKNIAVLCIGTQGTGVGLRIGGHARRGGSWMRRFHRQATPVAMTNEYRSSQTCVFCFEKVSRPKRRTIVDGKNKPVSVNGASLCQNPQCISVRTGHAVQGRDTMTAVAIALAGISAMRTGSALRPFRPSDNISQFNADLKDLDTSTLSAG

SEQ ID NO: 4082 - protein, 539 aa, Apophysomyces ossiformis
MKESEIQNIASEYAFKHIAGGSPQWPNSIEPDLPLVAIVDKISLDLTRFGFNSLGDFTGNANHRFAYRILSDGFAVNLVFARKQKEKVPATEIDLEDFTTDEVEQWFEPWTVDAGLNQIYTAADGSDSQSHQVRRVSTKEYYTMTGSTRKAKQLKKQKDAAGITRIETGLETCKTGPDMAEKRFNNYQPVQRACEELVYVLVNGWKKYFCKHCRTLWQRMFYITNSVWRGQGRPIEFCRPAKNDIATTNMVSSITDQRFQEEEPSAAKKQKMDDMNSGSEGEYARYWTDWFLDLRGNEYFCEVDESYIMDRFNLTGLNAEVQQYYSEALDMITDNLGKETNSVNIDETEDADCFCFFGDCCLLIEEENLDDKAREQIEKAARHLYGLIHARFIITTRGLEKMLDKYKNASFGRCPRVLCNMQALLPVGLSDVPLTETVKLYCPRCEDIYNPKSSRHAALDGAYFGTSFPHMLFQAKPSFLPTKTYERYVPRIFGFKVHEIAEQHRWQDKARKEFEEKLRQRQQRLQLPRDESSSTKPPA

SEQ ID NO: 4083 - protein, 413 aa, Apophysomyces ossiformis
MTGEIGSLYTWSLKRFEQKIAITEGKPQKHVSTAYVHRMVEELVNTNPLSKRLRSSLKYAVREAIRKKSLLRLPKRFKPLPEAEMASLETFIKETIVAIESHTFAPEKYTDPKGTRKFTMLPVYTFQMRHVTVDNQALARLLFQTGRRENQTPVHPSETRREYFDLFDKAKIGYPTYESLENEKTVFWDVIRTDGMDVEFIFKKYKEPFDPKKKPLTPANLKGKYDNAVIWGVDPGVSSVFVAADGNPSSPHRVRTTTTTEYYSICGYNRANQRRKQYMDAAPEAKKLIDDIPSLKTTDLQKFTDSAKYIMQHYETITEFYSRDLRYNKLKFKSYIGRQKGRAEIAKTLLSGSKKYNSDSSQNQKMPNEKKWVAHCPNDEHDERNGPIIIAYWQWDFFRLNAWSGGCPNESDS

SEQ ID NO: 4084 - protein, 889 aa, Apophysomyces ossiformis
MDMLFQFYGPHRAEARFRGYQGVQRAKEELVNILAFGGKKYNCSRRKWTRSNRKSRKRKRKNWKKQVNKDSEVGNRLHQSLPQPNTSAERSTLNKTKRLPHWRQKKFIVERKVPLIVFGDGMFNNRCKYKGHQKGVVNILWRSLKRREKREKLLVLTIDEYLSSQVCHSCRCRSLQKLTTADCVSHYSILVCKNCKMLWDRDVLASEHIDTYQARNHLSDAKKTINMPPKKAAKADVSENEPLSKAQEEEMSSALIAKLLAEDAANGNDDYYAEYSNDVKGYDPYHGTDERDDSYEEESEDDYAPKRNGKGRGRGRPPKSRRGRKRKIVTTEESTQDASSAINTEKPAEEGQTTEPSPAKSNEAKPVSKKPRKPVPEGYNTGNYSEEEEKRFLEGLELFGRDWTKLQAHIATRDANSIRSHAQKHLIKLFRDGIPLPEKVRETGEGYTLSGKPLDPNSAAAKPYLMRMGMCTETPKTTAVQKPAETVQDSSTETSPKETSNEDIQKFGNATKDAGSSPKASDVLPSKPSPPAVQSQDSPKIKKRKQRSRSSSVERVPSAYDESGRTNYSKLRLRQPRDRTSVNHSQLGKDDDPLTMVKCEPFIGKPGSDTSGSQPFQILVHSNVLLSMDFHAHLMTTEIIGFLAGEWDKQKMLMTVKKAYPCRSLNTGHNEVNVEMDPTSAIETRQLIEENNMKVVGWYHSHPTFIPDPSLVDIENQRNYQILCRDECLEGNQNKTVEPFVGAIVGPYDPRLPGSASVINWFYVGDSRHERAIPKRLIYDLQEDECVSDEEADRLFNLLEVYKESEEKVDFSDRWRRDIQESKLAKLIKSLGMRMPWIQNKLRQQPMDEAMSTTGEDEKSSENQTEAESEDSIIIDPFLEKVQARLKDW

SEQ ID NO: 4085 - protein, 1129 aa, Apophysomyces ossiformis
MSRDGDLFAYQGALDVPRITKMNWRHGPQRYNGTVSTKRGLLTAFMGLQAAITDEQAINAQIRFVILEATCGNNYAKNLRGKSFKRVKAALSRLLEPAPELNEGVIEEEDTGPHAPKAGKKQTRPAKRGRAGPSRRQAQFIRAAASGEIRDSFLEKITYTEEDTGHHITLYQSSRYVATADAGLYSSVLAAAIERARRRNRPDQEGIDEASLIEKVMDKVVDDMSYVRYVGYHIANIAIREAYNLDNDTMLSFYELFFRNGKRTAQDLWRHNLYCATNYQTMGKREPTLATRQAASEAQYIAQSDILHSDSQLRGHNDDRTNLFKAFTADTAFFYMSRMLTTPLERNVLLKARKLWYQDCSAEMCIASTPMYMGEMVTEVANGASVDFRKNIVYNFKHRYSDCLRSRLKEVARVPVGWPAPDQGRFDEFIQDIINSVHDGIQHVAAEERQPRFQYIAEANIREQVNKFVTNTVNRYKSSIEAFDGHRCRLEVENHATVPQGWPRNRDKLIAALFQRIWGMSIDISEAGADQENLEEYIEDFITAERNLQVKGIRVSEVNLSECLGENGRQGTNGGNDDEENGDEDDEDDVLHRTYGGKLSKARAVRLIPFMVYFLERREGNSQSSVLCPLQAHHRIAIPFNLSFTTTLLTRIEHFSRAIIQQLEQELTAGRNDRRIAELTRERDNLRNACARLQGIKSRDSFSALFDIRRQATITRDGGVDVRDRGYMRWLNQRIRGNENKLRFSRRRVFCTDRVRLYCIYNVWLRSRRGNTTCKYLTELWRTTRETLKDTWQAGSPGNQYDYLQHYDGIVGLDFGEVCAAASVFRPREPGLYGSQLTIKRGYLYGRTIPNRDWLEARKAANNIDDIEAALSEGPPGSTYDRYRKCTFDMNHEMDDNRRRVDEPRLVYAFGLDGMSRKSRRGALAPMDHKIANALYRKINQKNRSKDRQHADVCTRVDEYLTSKVCCRCSKKDRARLENDAREKEQRVLRCENCGHTFHWDSNAADNQATIARYMLRFQQRPRCFIHPSRHLEAAGEEEAMVTTGRAGLQQRASGGEVTEVPGIAEPRRHPSQEAAVITPTARRRTRASQTETMVEPPRSRRRISRREEERSESSRAPLRRSERQQAKR

SEQ ID NO: 4086 - protein, 237 aa, Apophysomyces ossiformis
MFRSLATDGYTVAFTFSRRRQHLTEDGNLAKTMKDFREDQHRFHLIGVNPGITDVYVASNGHEKYSHEIISSSTKEFYHLAYYNTSKAIMDRMKNEKPKIQQIEKDMPSAKTASISQFDRYARFLLLHMSTLHQYYDRRRIGRQQASDEFAERLISGGSKYPTKDTRNQRRHHALSLTWTSRLRLESSLENRNRTSCRKLPNTFARNKWSKATPHPTKRKPLFAFGSAMFNSTLKGT

SEQ ID NO: 4087 - protein, 390 aa, Apophysomyces ossiformis
MVNTNPYIPDNIYDFWNQFRERHLAIAFPRNNFTGYSNALYAACKILRDPYINDMVDNSQQRVCGFIIHRLQTLVPDLSKASASQIVYDICTRALAVMYEQEHQQSDDEEPGNLPRLFSLALKPSFLLRFVTINAKALSRWFKSETIQTIMKPKTVELELEHITAEDINKYCRACGIDPGVRHLYTESYGADKTEHEIRRCSSAEYYYMTGSPQRGQQLLKQKRHQGIDTIESNFPTAKACDIRKYNGGLDYFFLQKDALFNFYGPNDRERRFRDHQGRQRAAEELANILIDGGCKYNHRKRKYRSANRKKRKKNHGQHIRHKKKNIGRIPEQPLSAVRSTVDESRRARSWKRSQLNPDNNGKMPLFVFGARMFGKNKCRYKGHRKAAVN

SEQ ID NO: 4088 - protein, 504 aa, Scenedesmus sp.
LAVAGELLDRLDADAAVLYQHLAAEVLEDGLAACRAAELQADSAIAALRQRNPGLPGDAAPRARAAAFAPGVDDALLARLRKLSEARGRCDALAGRRGFSLQPRQHYGRVHLHLFETAQGHLHRDTLELQRAACPGFDLEAAAAPPSRDPLPPWRRPARPGAADRRAFKADDRARAQAALAAGGAVLDAAFDPARPAAPAAVAALGRTLAWGWDPGLGDIAACRALSHPACGCTRRGHRTAAQHRCPAAHDARGGADVVTLSMRGYRDASAFNNRTRNQETRGRGRLGYLRRRVEHRARAPAAVLFVGSASAGRGSIIARPQDAPVKTLVRFGERHGYCVCMIVNKCWTSQVHHACMAATTNAAPGMNKRDGFKVRQCYGTCRTDAVPPRPLLFNRDVNAAANIAALGLAQTFVNADRQRLLAAGFTEAQVGLASTTAGAAATRAVRAAARATRGRDRGGCGRGGGRGRGGGRHGRGGRGRGGGGELTPPQSDGDDMDWEPGAG

SEQ ID NO: 4089 - protein, 995 aa, Scenedesmus sp.
MTTKSRRVARDFVVMLGQQHMFAACAPRLADSLAAQQGAAARPALEAMLRRAASLGAAPEPASAGALAAAVESLAEALDGSSGRSGSGSGSSSSRSRGQRPPAPPKLLDASAQEPRLRELQRARELGKLEAAVQRLRAAVDASEAAVRLRKEPLKDLQREVASRAAVQGGMTGPPDHARNRLRRLQRKDAHAAALRRRLAVAEARLLRARGQGAAPGAAPGQGPGAAPGQGPGAALPAAAAERLRLALAALTAAGDATVEADLAAVEAEWQAAVVQHHERDAALVQHQRRLARPHGAAAAPDADAARRAADAARAARDQGARLLGDCGARLAAARGYLAAARGYLAAARGYLAATAAAQGRAAPAPPAQQQQQQQQQQPPAPRTLEEAAAAVAALRRDVPAGWRRAVCATLEAVLAAATAAGAGPPPAAPAPPGGRSGGAQPPQRAGGAGQHPDALIAVAGACKVLRALRSRHAARVALPKRRAFTLAPVPKYGTQHLHLSTSGMQALDAALRARQAKALAGGQPAGQPPPPNTAPPGGGAPPPAPPPPHGDYDPIWDSYFDFGRHPGRARGVLHANTRFAGSVTFDLAALHVRVRVEGAADPAPRHGQQSRAAKAAQRAAEHRAGAAAARRLLCDALAPHGVADEAALDALPLDPCELRGVDGLPPGHALHGAAAAVHAGVRIVGIDPGRARMICAATWRQGPGCTRVAHRRIAQRRCPNAPRHRGDHGRRYEAERIIRIKTAAHRDSRGIERHRLWQQGRPGRPGRYERRPPGGGDCVHACLNRVPAYSGTSVAAAGAWRNGRVHHVLDNEFAYSLLACRAECAWRLRKHGLKQRALHAAIQLTAYGRVFVRGRVRQHARLPADLPAVVLGIGDASLGMGGCISGPGPPRQALLALLRTYYARRRVAAVLMDEHRTSITCSVCGARVEKLRGIYGLVQCPGCTVVAPRDDNAARNICALTLHELLRGGRGTAGGARLAGAFRQAAAAAVDPPA

SEQ ID NO: 4090 - protein, 301 aa, Scenedesmus sp.
MRAPAAGTEVRKQRNEACRAAGRAALKEKVPDRGAPPDRAAGGARALHVRVRVEGAADPAPRRGQQSRAAKAAQRAAEHRAGAAAARRLLCDALAPHGVADEAALDALPLDPCELRGVEGLPPGHALRGAAAAVHAGVRVVGIDPGRARMLTAYGRVFVRGRVRPHARLPADLPAVVLGIGDASLGMGGCISGPGPPRQALLALLRTYYARRRVAAVLMDEHRTSVTCSVCASRMEKLRGIYGLMQCPGCTVVAPRDDNAARNICALTLHELLPGGRGTAGGARLAGAFRQAAAAAVGPPA

SEQ ID NO: 4091 - protein, 1287 aa, Scenedesmus sp.
MQLSAQRSAAAQRPAAASRAAAALPRCSLRAAPFTAPRQQSGLASSCSSALAPARRGLQAPAARAGRAGVRSLAVRSEISYVMVKPDGVQRGLVGDIISRFERKGFKLVGLKLYQTPKEVAEEHYKELSAKPFYPKLVEYIVSGPVVAMVRRSSRARARVPGSGGGGAGGAAAAARLTRRGARARAQVWEGAGVVASARKLIGATNPLAAEPGTIRGDFAIEVGRNIVHGSDSVENGERETALWFPEGTASWDQTMTPWLKDPAYFPTRQAPSPTQDCPVDRATGARALLAAQPARAAMGSLTGGGTSGARSGGGPPGPPPARGIDPAECAAQPVEGADWEALCRHAQARGEAARAAAMAAVLSAPAASVGTSASSAAASSDEEEGGPAAKRARGADAAQRRSRGRGRARSRGSAKAATRGGRTPSRGGGRARSRGGAAAAPRGRRKRSRGADEASGRASPARGAAAAEAGDKAGRQQQALPRHFAKRAKTRTEQAKKAAAGSGMRVRVCALRGAVRKPERRCPNAPRHLGDHGRRYEAERIIRIKTAAHRDARGIERHRLWQEGRPGRYDRRPPGGGDCVRACLNRVPAYSGTSVAAAAAWRNGRVHHVLNNAFAYSLLACRAECAWRLRKHGLKQRALHAAIQLTAYGRVFVRGRVRPHARLPADLPAVVLGIGDASLGMGGCISGPGPPRQALLDTYYARRRVAAVLMDEHRTSITCSVCGARMEKLRGIYGLVQCPGCTVVAPRDDNAARNICALTLHELLRGGRGTAGGARLAGAFRQAAAAAVLPPASAQPAPTEMRTAALGRASSSRVARARSGAGVVPPFGQFGRAMLPTPHRGRSGRLRASGVASAERLLKTVSSEALSDEEVKKLLQRPRIDFTSILSTVGPIVEQVRAEGDAAVRALTERFDKVKLDDVCVATEDLPWPVLPEEVSRAFDVAYANIRAFHEAQRGADLSVATMPGVTCRRVTRPINAVGLYVPGGTAVLPSSALMLAVPAQIAGCGTVVLATPPRPDGSITPEVLYCAKKAGVTHILKAGGAQAVAAMAWGTGSVPKVAKIFGPGNQYVTAAKMALTNSEAMIAIDMPAGPSEVLVIADEGANPAHVAADLLSQAEHGPDSQVVLLALPGVDLDAVQAAVQKQCDELPRNETARKALSHSCVVQVRDREEACRISNAYAPEHLIVNVDDPEPWLPLLDNAGSIFMGRWTPESVGDYASGTNHVLPTYGYARMYSGVSLDSFTKKMTVQSLTWEGLQVLGPHVAKMAEVEGLEAHRRAVTLRLEQGS

SEQ ID NO: 4092 - protein, 1333 aa, Scenedesmus sp.
MAAPGAGRLLDYRAPTSWSEDAALFERARPWRKVALAVGLCALGTVMLITGISLWYTGGPEGGAATALLVLGSICFVPGAYHTRIAVLAWKGVPGYSLDAIPDMKQQTEQAKKAAAGSGMRVRVCALRGAVRKPEVVPYLEALVCAYSRLGILGRDAHHVALVYGASRLYGLDTRQPPPQPAAQEQGPQQPQPPPAAQQAQQPAPPPPACACYLQAACGGAPLVYDLMNFFSQGNWRRVGGGLSSDLRHALEQACGVNELQRVPLPAWVTGRLHHDLVNPLAELYNTNLQLHLADGERLEKALDAAALQAWFAAGCAGTPSRAARDCLIAGGAALLYSASPLLWERQGVLQPGEGVVPAAAGDGQDAGRLRLAMAMMRDMLARMRLHLEQPFPAAADGEARAPAAGAARTRQAAGAQATPGLQRWESDEAAGKHGRVLDWARSGMPRAPDAGAQAGGAPLVPQPPEPLAHGAGAAARQQHDAAYDAWRAALARQLEGLAYREGDADAMARRVARDFVVMLGQQHMFAACAPRLADSLAAQQGAAARPALEAMLRRAASLGAAPEPASAGALAAAVESLAEALDGSSGRSGSGSGSSSSRSRGQRPPAPPKLLDASAQEPRLRELQRARELGKLEAAVQRLRAAVDASEAAVRLRKEPLKDLQREVASRAAVQGGMTGPPDHARNRLRRLQRKDAHAAALRRRLAVAEARLLRARGQGAAPGAAPGQGPGAAPGQGPGAALPAAAAERLRLALAALTAAGDATVEADLAAVEAEWQAAVVQHHERDAALVQHQRRLARPHGAAAAPDADAARRAADAARAARDQGARLLGDCGARLAAARGYLAAARGYLAAARGYLAAAAAAQGRAAPAPPAQQQQQQQQQQPPAPRTLEEAAAAVAALRRDVPAGWRRAVCATLEAVLAAATAAGAGPPPAAPAPPGGRSGGAQPPQRAGGAGQHPDALIAVAGACKVLRALRSRHAARVALPKRRAFTLAPSRAAKAAQRAAEHRAGAAAARRLLCDALAPHGVADEAALDALPLDPCELRGVDGLPPGHALHGAAAAVHAGVRIVGIDPGRARMICAATWRQGPGCTRVAHRRIAQRRCPNAPRHRGDHGRRYEAERIIRIKTAAHRDSRGIERHRLWQQGRPGRPGRYERRPPGGGDCVHACLNRVPAYSGTSVAAAGAWRNGRALLALLRTYYARRRVAAVLMDEHRTSITCSVCGARVEKLRGIYGLVQCPGCTVVAPRDDNAARNICALTLHELLRGGRGTAGGARLAGAFRQAAAAAVDPRPRPRRTRALSAAAAQAAPGSAASTRLAAAAPGRMGARRAPRAAC

SEQ ID NO: 4093 - protein, 708 aa, Scenedesmus sp.
MAQHHERDAALVQHQRALARPHGAAVAPDADAARRAADAARAARDQGARLLGDCGARLAAARGHLAAARGHLAAAAAAQGRAAPAPPAQQQQQQQQQQQQQQQQPRAPRTPEEAAAAVAALRRDVSAGWRHAVCATLEAVLAAATAAGAAPAPPGGRSGGAQPPQRAGGAGQHPDALVAVTGACKVLRGLRSRHAARVALPKRRAFTLAPVPKYGTQHLHLSTSGMQALDAALRARQARAPAGGQPAGQPPPPPPPPPPTQEGGGYDPVWDAYFDFGRRPGRARGVLHANTRFAGSVTFDLAALHVRVRVEGAADPAPRRGQQSRAAKAAQRAAEHRAGVEAARRLLCDALAPHGVADEAALDALPLDPCELRGVEGLPPGHALRGAAAAVHAGVRIVGIDPGRARMICAATWRQGPGCTRVAHRRIAQRRCPNAPRHRGDHGRRYEAERIIRIKTAAHRDSRGIERHSLWQQGRPGRPGRYDRRPPGGGDCVHACLNRVPAYSGTSVAAAGAWRNGRVHHVLDNAFAYSLLACRAECAWRLRKHGLKQRALHAAIQLTAYGRVFVRGRVRQHARLPADLPAVVLGIGDASLGMGGCISGPGPPRQALLALLRTYYARRRVAAVLMDEHRTSVTCSVCGARMEKLRGIYGLLQCPGCTVVAPRDDNAARNICALTLHELLRGGRGTAGGARLAGAFRQAAAAAVDPPA

SEQ ID NO: 4094 - protein, 501 aa, Scenedesmus sp.
LHANTRFAGSVTFDLAALHVRVRVEGAADPAPRRGQQSRAAKAAQRAAEHRAGVEAARRLLCDALAPHGVADEAALVALPLGPCELRGVEGLPPGHALRGAAAAVHAGVRIVGVDPGRARMVCAATWRQGPGCTRVAHRRIAQRRCPNAPRSRDDHGRRYEAESIIRIKTAAHRDSRGIERHRLWQQGRPGRPGRYDRRPPGGGDCVHACLNRVPAYSGTSVAAAGAWRNGRVHHVLDNAFAYSLLACRAECAWRLRKHGLKQRALHAVMQLTAYGRVFVRGRVRPHARLPADLPAVVLGIGDASLGMGGCISGPGPPRQALLALLRTYYARRRVAAVLMDEHRTSVTCSRAPPPAQARSEQVQAQQVQAQQAQEQQRRRRPRRAAVAAAAAAASLLLAAGGASAGPPAAAFAAKCAGCHVGGGNIVQAGATLFAPDLARNGVDSPAALYELIYAGKGRMPGFGADCAPKGKCTFGARLSDDEVREMAAFVLDRAAAEWKD

SEQ ID NO: 4095 - protein, 1482 aa, Scenedesmus sp.
MAAVLSAPAASVGWSAGSAAASSDEEEGGPAAKRARGADAAQRRSRGRGRARSRGSAKAATRGGRTPSRGGGRARSRGGAAAAPRGRRKRSRGADEASGRASPARGAAAAEAGDKAGRQQQQALPRHFTKRSKKRTEQAKKAAAGSGMRVRVCALRGAVRKPEVVPYLEALVCAYSRLGILGRDAHHVALVYGASRLYGLDTRQPPPQPAAQEQGPQQPQPPPAAQQAQQPAPPPPACACYLQAACGGAPLVYDLMNFFSQGNWRRVGGGLSSDLRHALEQACGVNELQRVPLPAWVTGRLHHDLVNPLAELYNTNLQLHLADGERLEKALDAAALQAWFAAGCAGTPSRAARDCLIAGGAALLYSASPLLWERQGVLQPGEGVVPAAAGDGQDAGRLRLAMAMMRDMLARMRLHLEQPFPAAADGEARAPAAGAARTRQAAGAQATPGLQRWESDEAAGKHGRVLDWARSGMPRAPDAGAQAGGAPLVPQPPEPLAHGAGAAARQQHDTAYDAWRAALARQLEGLAYREGDADAMARRVARDFVVMLGQQHMFAACAPRLADSLAAQQGAAARPALEAMLRRAASLGAAPEPASAGALAAAVESLAEALDGSSGRSGSGSGSSSSCSRGQRPPAPPKLLDASAQEPRLRELQRARELGKLEAAVQRLRAAVDASEAAVRLRKEPLKDLQREVASRAAVQGGMTGPPDHARNRLRRLQRKDEHAAALRRRLAVAEARLLRARGQGAAPGAAPGQGPGAAPGQGPGAALPAAAAERLRLALAALTAAGDATVEADLAAVEAEWQAAVVQHHERDVALVQHQRRLARPHGAAAAPDADAARRAADAAHAARDQGAPAAQGRAAPAPPAQQQQQQQQQQQPPAPRTLEEAAAAVAALRRDVSAGWRRAVCATLEAVLAAATAAGAGPPPAAPAPPGGRSGGAQPPQRAGGAGQHPDALVAVAGACKVLRGLRSRHAARVALPKRRAFTLAPVPKYGTQHLHLSTSGMQALDAALRARQARAPAAGQPAGQPPPPPPTQEGGGYDPVWDAYFHFGRRPGRARGVLHANTRFAGSVTFDLAALHVRVRVEGATDPAPRRGQQSRAAKAAQRAAEHRAGAAAARRLLCDALAPHGVADEAALDALPLDPCELRGVEGLPPGHALRGAAAAVHAGVRVVGVDPGRARMVCAATWRQGPGCTRVAHRRIAQRRCPNAPRHRGDHGRRYEAERIIRIKTAAHRDSRGIEQHRLWQQGRPGRPGRYDRRPPGGGDCVHACLNRVPAYSGTSVAAAGAWRNGRVHHVLNNAFAYSLLACRAECAWRLRKHGLKQRALHAAIQLTAYGRVFVRGRVRQHARLPADLPAVVLGIGDASLGMGGCISGPGPPRQALLALLRTYYARRRVAAVLMDEHRTSVTCSVCGARVEKLRGIYGLVQCPGCTVVAPRDDNAARNICALTLHELLRGGRGTAGGARLAGAFRQAAAAAVDPPA

SEQ ID NO: 4096 - protein, 2048 aa, Scenedesmus sp.
MEPEPPPPPPPIGGGQQEAQQRAGAPAQADPAHPVAPAGLFALPVLNWGAPQPAPQPAAPAQPRPPPAGAGWRRAYRGPAEDDWLQPPEQHQQQQQQQQQQQQQQQQRAGAAPRHPPAGGGFAYQEVVRGQARQDLPGHDCAQCRDFYDALSTWGAPAPGTTMLLPCAHALAPAALQAASRHRAKHAPPETPPGFWDIGFALGGGGRGSPGPSSSSSGSGSVSGSGRRGGSPAPRPDDAPVPAPAPPPPVAPQQRQPQPAAPRGAPAPAPPPPPPPPEELMAPAGTCSGAQLRALQYELWRCGLELVHGRADGLCAYYLIAAAMLGLLHTALPRQPHEDVRTFDAATMPVLEEQALQLRALTARRVLELGLNDAMHDSGVPWREVFVDAGGEAAVRALAQRASEGNLLVLFALPAAAAPAFAPLFGAQNPLPLNHWAAVVRARRPPPRSPPALLGQPREPPRGAPAVLQQAREPPRGAPAQQRLQEAAPRAAELAADSSDEEGGPAAGQPLQPLQPLQPQQLGRKERRGKGNGAAAPLGTSNSDSSSSSRRRRRAATAAAIDAAWEKPVERGAELDASKARAEAAGPSDEDVRRSKQRASYDAKHARRGGGGTSRARSDSAGGSAGSSTGGGTSGARSGGGTPGPRPRAHRPRRVRGAAPAAEAGDKAGRQQQQALPRHFAKRRKQQTEQAKKAAAGSGMRVRVCALRGAVRKPEVVPFLEALVRAYSLVGILGRDAHHVALVYGASRLYGLDTRQPPPQPAAQEQEQGQQQPQQAQQPAPPPPACACYLQAACGGAHLVYDLIDFFSQGNWRRVGGGLSSDLRHALEQACGANELQRVPLPAWVTGNLHHCLLAPLAELYNTNMQLHLADGQRLEKALDAAALQAWFAAGCTGTPSRATRDCLIAGGAALLYSASPLLWERQGVLQPGEGVVPAAAGDGQDAGRLRLAMAMMRDMLAQMRLHLEQPYPAAADGQARAPAAGAARTRQATGAQATPSLQRWESDEAAGKHGRVLDWARSGMPRAPDAGAQAGGAPLVPQPPEPLAHGAGAAARQQHDAAYDAWRAALAQQLEGLAYREGDADAMARRVARDFVVMRGQQHMFAACAPRLADSLAAQQGAAARPALEAMLRRAASLGAAPEQPSAGALAAAVALLAEALDGSSGGSGSGSSRSSRSSRGQRPPAPRKLLDASAQEPRLRELQRARELGKLEAAVQRLRAAVDASEAAVRLRKDPLKALQLEVAGAAVPDRHARNRLRRLQRKDAHAAALRRRLAAAEARLLRARGQGAAPGAAPGQGPGAALPAAAAERLRLALAALTAAGDATVGADLAAVEAEWQAAMAQHHERDAALVHHQRRLARPHGAAAAPDADAARRAVDAAGAARDQGTRLLGDCGARLAAARGLLAAARGHLAAAAAAQGRAAPAPPAQQQQQQQQQQQQQQQQPPAPRTPEVAAAAVAALRREVSTGLRRAVCATLEAVLAAATAAGAAPPAAAPAPPGDRSGGAQPPQRAGGAGQHPDALVAVAGACKVMRALRSRHAARVALPKRRAFTLAPVPKYGTQHLHLSTSGMQALDAALRARQAKAPAAGQPAGQPPPPPPTQEGGGYDPVWDAYFHFGRRPGRARGVLHANTRFAGSVTFDLAALHVRVRVEGAADPAPRRGQQSRAAKAAQRAAEHRAGVEAAQRLLCDALAPHGVADEAALVALPLDPCELRGVEGLPPGHALRGAAAAVHAGVRIVGIDPGRARMICAATWRQGPGCMRVAHRRIAQRRCPNAPRSRDDPGRRYEAESIIRIKTAAHRDSRGIERHRLWQQGRPGRPGRYDRRPPAGGDCVHACLNRVPAYSGTSVAAAGAWRNGRVHHVLDNAFAYSLLACRAECAWRLRKHGLKQRALHAAIQLTAYGRVFVRGRVRPHARLPADLPAVVLGIGDASLGMGGCISGPGPPRQALLALLRTYYARRRVAAVLMDEHRTSVTCSVCASRMEKLRGIYGLMQCPGCTVVAPRDDNAARNICALTLHELLPGGRGTAGGARLAGAFRQAAAAAAVGPPA

SEQ ID NO: 4097 - protein, 1559 aa, Scenedesmus sp.
LAAARGHLSAAAAAQGRAAPAPPAHQQQQQQQQQQQQQQPPALRTPEEAAAAVAALRRDVSTGWCRAVCATLEAVLAAASAAGAAPLAAAPAPPGGRSGGAQPPQRAGGAGQHPDALVAVAGACKVLRALRSRHAARVALPRRRAFTLAPVPKYGTQHLHLSTTGMQALDAALRARQARAPAGGQPAGQPPPPPPPPPPTQEGGGYDPSRAAKAAQRAAEHRAGVAAARRLLCDALAPHGVADEAALDALPLDPCELRGVEGLPPGHALRGAAAAVHAGVRVVGIDPGRARMVCAATWRQGPGCTRVAHRRIAQRRCPNAPRHRGDHGRHYEAERIIRIKTAAHRDARGIERHRLWQGGRPGRPGRYDRRPPGGGDCVHACLNRVPAYSGTSVAAAAAWRNGRVHHVLNNAFAYSLLACRAECAWRLRKHGLKQRALHAAIQLTAYGRVFVRGRVRQHARLPADLPAVVLGIGDASLGMGGCISGPGPPRQALLALLRTYYARRRVAAVLMDEHRTSITCSVCGARVEKLRGTYGLMQCPGCTVVAPRDDNAARNICALTLHELLRGGRGTAGGARLAGAFRQAAAAAVGPPGVSGVRAAGVETTGRRSHGGSEAGEHAARGSPPKADGRALSESRDDTLPGSPSVKGRLSIPAGGAAVGGRARARARGDSSSGLGAAPTRPTMAASPKQQRAPRGGGGRAAAAPPGRPLLLLAAMTGALALLVGYALHTFFLWTPPPQPLDAPGARFSEARAREHVRVLTQDIGVRSVGTPGLQAAHAYIRERCAALQRAAAGSGLVVETATEHYSGSTPFDFVGDRFINAWHNITNIMLHISRADAPRDAPAVMLVAHHDSPVGSPGAGDDASNVGVMLELAANLSAAAFMQSSPWAARVGVFVNLESIGPGGAPIVFQHAGAWDVFDLGLVLGDTDFRQLSYLHRGGLPGIDIAYLLAGAAYHTDRDTLDAIRPGEMGETLTGAVASLGDALAAAGEHSPAALAALLAPREHKRFFLSVAGKAMLTYSTATAEVLHVLPLAAVLAAPAALAALAPDTALPPRRALAVVAGGAVKGGATLLASLVLPAGFGAARACLTGRPLAWFAAPGVAFATYLPFTAALLLLPWSGADYFASPGGAGLLPLHMLGGALTNAAIAAALTRAGIGMAGLFALWGAGGVGAALCVSRGVTPARLAGALACVAWPVYSAAESALVTAVVMMERMSLTGHAFAGLGDAIVGVMLGLSVVSLTGLVLLPLVQALLRPRAARSAAVLLLAAALIAAALTSHSRAYAPYSAAKPKRLLLAHLHFTEPAAPPPEDAGRGGGDPAEPGAPPLVMRVANASWALAGTDSTPVSLLARAMGLDPASALPARGGEWDVVYPISKLVDVLLFPAPPARGVVAALPHVRLLGARAARGPAGELLVEATLSVFSAKPCWATLKLAAPRLHSWALHDGEGWTDAAEFAAGVASGSGRAVPRGAGPAAAAGARSVLIKWTSEVQEGPLRWPLRVRLHAPPGGAVGGAALGLDAELHVGYVERTAALAGMQARMPPWSTLSYEGTTYISSWSW

SEQ ID NO: 4098 - protein, 1367 aa, Scenedesmus sp.
MVLRRRGAAARGAGRRGGGDAVAPAGRAASGRERPRSRRALTSRVGHHLAAAGPRHRPRGSHTVTPGSAGRRVRPAGQGLRAQQQRSATGLLGPQAASAPLPRRFCLGTARPEGGPDALPLDPCELRGVEGLPPGHALRGAAAAVHAGVRVVGIDPGRARIVCAATWRQGPGCTRVAHRRIAQRRCPNAPRHRGDHGRRYEAESITRIKTAAHRDARGIERHRLWQGGRPGRPGRYDRRPPGGGDCVHACLNRVPAYSGTSVAAAAAWRNGRVHHVLNNAFAYSLLACRAECAWRLRKHGLKQRALHAVIQLTAYGRVFVRGRVRPHARLPADLPAVVLGIGDASLGMGGCISGPGPPRQALLALLRTYCARRRVAAVLMDEHRTSITCSVGGARVEKLRGIYGLMQCPGCTVVAPRDDNAARNICALTLHELLPGGRGTAGGARLAGAFRQAAAAAAAGDQRMPMVGVGGGGARARRWQRRARAPRTRAARPRRRGAPRGAPAGPIPPAAGVETTGRRSHGGSEAGEHASRAEVEARARDRPVKERVERCAPRQRDARARRDGLSVASALARPRRAAMAQTECRAPPPSLGGAKVRIKLKLPPGGARRATPSGAPGPAPGGAGAGGVAQTLAELHTAVEAFCQQGVAGLPGGVLLSPWREPSPEPPPPAPQQAGPGPEPEPGRRRVRKRLAPGGGELGEPGGGEQLAWGSSKRQRSTRGRARDTAQLSNSVQSMLEPGAPAAPASPSVASELPPPAGAAGAPAAKQPSRGGSEGGGPPPQQLAAQARRSRLQQSSGQPAEPAPPPAQGAQGVEPGGAAGGADGAAARGPPAPRQQQQQQQQRRRAAAARAGAGPAAAPPAAAGAAAAAGAAESPPSEASHQQQLGAAAPQHLQQLLPGAAAASRGAAPAEPAAQVELAGGPQLAAEQPEQTAVSRDRSQCSLPRGPDTARGLDAVSMPAPPPAPPAPPAPAPLGGGGGGGAAAGGRLLELAPGAMTPVARALAVLSAVPPVRQRALPPDDRPVRSQEEALAYLGSLMDRAKQLKHQGDRRHNSLGAWDVFGLSHYALSTAEFLLAWDAALRLLARLRGAGAPVDRLAAHVAGLSGAQFLRQTGALSAMAMASCSNCRGPDVAKQALRMLLERLGAIANMRNLHNQRKQLEAHVRALKAGGGAAAGAAQAQARLQAQRAAAAAATAAAATAAAATAAAAAAAAGKPPSPGAWSAAGGQQAFNKSSPDDSNTSNQERVTLPPAEPAGGGAGAGGGGGGAAAPRAAGGAAERALALAKSERALMESMQELLRMTDGMHQTVMRVQQFLESPDVLGSEHARAAALHISVLGLDAGMFSLPRVAAHTEAAVMCITKLLRRA

SEQ ID NO: 4099 - protein, 1108 aa, Chrysaora achlyos
MSTHPEERKVLSDTPVVEYLISGKQVATVNIRLTCQGNRVSIACHVVPVTRPQAQPCSTGELMSTVQRSRHSVYAIKYHVVWIPKYRRRVLKDDVAKRLESILRGLASEKGWNVIELAIQPDHVHLFLETSPKIAPNEVVRICKGRSSRLLRKEFKHLRFFARTMWTPSFYIGSIGHVSAETVQRYIEAQSNEAQAAELARTFGCVRYVYNFGLALRRDAYEQGGATLKYKDTSAALTALKKGEETAWLREVSSVPLQQALRHLDKAFTGFFEKRTGYPAFKRKHARQSATYTRSAFRYVVEGGRPVLHLAKMKRPLKVRWSRTPPSDPSSVTVSRDAAGRYFVSLLCEVESESLPRLEKAVGIDLGLTDLIVTSDGFKSGNPRYLERDLKKLKKAQRWLSRKQKGSSRYAKQRRRVARLHARIRDKRQDYLHKLTTRLVRENQTIALESLNVAGMLKNGRLARHISGAAWSELVRQLEYKAVLYGRDVVRIDPWYPSSKTCSCCGEKAGEMPLSIRAWNCAACGAVHDRDVNAAKNILAAGLAAIARGGVGKTESHLSEATAPTSGECQGLITQLALRISAEIRAQSGAEFKLFLDRKDISWGQVWQERIEISLDSATFFFPVLTPSYFKSQYCLAEAIRFLERERQLGRSDLILPIYYIHTHKISTEASGVADQLLRHQYLDWRELRFEPLTAPEIRRRIAHAAADICKVIESQSPDLNEAKGRDALNDDEPVQRNGLSHARSTTVDEAKTHSVLSAAQDQIEEPLTITVGSSEPEQHSISIALKHASPGTRILIQPGIYYESLVINKSVELIGLGNEAKDVIIHATGRQPAISIKTNLCRISNLSFQQGGLQQPVAEISQGRASIENCDFSNGTAHGIIVANADPIIRNCKIHHCRGGGIIFEAQSRGTLEDSVVYENGLANIFVIDRSNPMIRRNTIHHGSQSGIYVYGHGQGLIENNDIYNNAHAGVATSEYGNPIVRQNRITQSQNYGGIYVFKRGRGTFEHNDLRATKSLPLLLNLQLSELGLGFSQFILKPGDLLIFGLNQRFGRFVGPVLLFAYHTNEPLQGSDNAYGQERECPIILWNNTLCGLPCGKTCYREPQSKE

SEQ ID NO: 4100 - protein, 1098 aa, Apophysomyces sp.
MSLPETLVVVPTENKVLLPSVVMKITMKGKEALAFTRKHYRQNDQRKTIPIACIPFTSSAVTEKLSNEGAQVAPSLEKHSVKDKKEDDGLLVRPDDKELLYDYGCAARIVRVQRSGLSVFTVFLEGVARFKVEKYTQDGLTLLAKVKYTERHSKEKLDEAKDEMIAFKALSKEFLSKIRDLQMPDTLIQQLSKLIDTVPSPVLADLLVSVIETSYEEKLFMLSTVDVKERLAKASEWLTRQLHVLKISEQIHSSIEGKLSKKQREFYLRQQLDAIKQELGETDELSGGKDEDEISQLNRRLSEANLPTEVAAVAQRELKRIKKLQPSSSEWSVTRNYLELIADLPWNKKSDEVLDIVRAKQQLEDDHFGLEHVKKRIIEYLSVAKIKGDLKAPIICFVGPPGVGKTSLGRSIASALSREFHRISLGGVRDEADMRGHRRTYVGAMPGLIIQGLRRSGVNNPLFLLDEIDKLAQSTHYGDPAAALLEVLDPEQNNSFSDHYLNVPFDLSTVLFIATANSIETIPEPLLDRMELIHLSGYTFEEKLHIAKSHLLPKQLNAHGLEPDQVSMADEVILKLAENYTRESGVRNLERTIASVVRSKCVELAELRESGKEAEYIPEVKVEDLEDILGIATFEKEVAEREPIPGVVTGLAYSGSGNGGILFIESTKMPGSGELQLTGSLGDVIKESAQIALTWVKSHAHTLKIAPSEHHNIVEKYDVHIHVPSGAVPKDGPSAGVTMVCSLVSLFSGYHVPPTTAMTGEVSLRGQVLPVGGIKEKVISAHRAGICKIILPYRNRKDVEADVPANVKDDIEFVFAKSIWDVLEAALIMNDTEKWTTRAFESHFVLGLIWGLLKGQAPSRIKTWIEATFSTCTDARSSVNVAVTCRDDVTPRPSEQQRKTKHYHNITTMTLPESKCDYLVGQIIALTQSQTFLSSREQVHVNAYHQVMPQCLRLYNERFCRLRLLNYIGRQRGTSEMIRAMTTGQLVVAKREWRSQKVERDDRIPLLGFGDGQFSQSLRGRPVGLSRAFHKILKLEERQGLPVIVSINEFRISRICSRCKSIHVEDIESVPGEKGTPLYAVLRYNHCRTVYQRNQNAS

SEQ ID NO: 4101 - protein, 229 aa, Apophysomyces sp.
MSGEPREFDGCVTQRGLKGLTQNACVWGVDPGVTDTFVVVDDGGADSHQIRKTSTIEYYNVCGYNSASRLRKKYMSEDADAKKTIDGISSLKSTDMKVLLGSVRCRLQNHVKITSFYRKDLWFNQLKWKTYVQKQNGTTEIAKQLVCGRPNRKLSDEPPVTHREAKEKWRCLDNRDRVTESRHPIITAFGNGAQSSSMKVKLPSPTRTIRKKALPVGKTDIGLDTSGYD

SEQ ID NO: 4102 - protein, 286 aa, Apophysomyces sp.
MSASNANFAPKPCPACGSTTLSSTRLGDCVAHSKSAQEILEDDLGKQMAFFARKCAVDSFVREAYRDLFCQIGKHLPRIQIESSLAKILTDGCAINLLFARKARDKLLSTELDLDDFNLHEVQMHFESWSLDPGLSQMFTGINGSGQTPYQVQRICSKEHYTMTGSTRRAKELQKEKDRSGITPTEMASSQQHNQYVACFLRHFATLSAFYKWMSILHPNGITHHGVLVCKCCHTLWNRDVNAAKNLNYIAKSVWRGQGRPTEFCPPTTNIAAPNVVSLLLQAAGI

SEQ ID NO: 4103 - protein, 449 aa, Apophysomyces sp.
MLFSFFDEDRINGVCAAYGLDFRHRVTITAQNIAILEGNVVRKCPVVSAYDEKRKKGRAKRNDSDLTLIFKGLTKDALATIEKRTAADKDIHSAKSKYKKAIDQGWRVNIGKIIREAKTRRSYAQKDLFRSKKLLAEKRSYRYELQKFIDMPQASQRKKRKKVKKREQNKMSIPTNNRLACEDSTESMDLTKLLAENADESIVFGGMDYGIKRPDVMKAEKSLLLNSFGNAKTPEDVLSCQKVRRGSCDVLRNFYHSTRFQHNSRIQQLRNDREYGLLTSIEREHVRKALSGPSTTIMCIGTGGMGNPSQIGAHSQRGGGNFEKKHRQYVPVCMTNEYRAFQVCVFCYQKTVHPKARRLVNGITKTISVNGTTKCRNPDCPAFKNEDATKNVDKQVVFAIALAGATHLLSSPRRVIPPFNSSQTNTSSFKLGKIAQPQQLSEHGNIRIT

SEQ ID NO: 4104 - protein, 562 aa, Apophysomyces sp.
MIVHFKDIENKRVLYETVLNLGTIYADGYDDAGREAYALCLDVDQKLFRDHGRFFFNGTIETDGYGLSVILQDQRTRAEGVIRRFYLLPEESPYIDEIGEDDFPDPERTMVCDPSRRDLLYMVHETSEPGLPLQLRYTQNQRQVESKLRTQRQRLVHEWTSEPQSNVPMTFNEYLRVRGANCQALSRFYGSTRYRKRRLRTYTNMRRSEDRLVNQFKHKIWRGCFPGDGQLGSAPYASFRRLFKKHGVPVFLINKAYTSSFCPACQGRAETFRSRSSPRPWRADETTRVHGLLRCQNQACRAAHGHTERSIWHRDLLACLNMISIVQAQRQHQQRPARFRCPPPAQLPQRLGGKRNKAAKNKCNSSQPKPLFLCHPYVTHMLVKGNFKAIVELPKYVDTNEWLAFNTFEFFNYINLFYGSITDFCVSLTCPTMSAGPGVEYTWSDTQSKKIKLPAPQYIDYTATSIENLLSDEDIFPTKAGRDFPRDLPIVVKKVFGQLFRLFAHIYHHHYDKVLSLHEEPHFNSLFAHFISFSREFDLLDKKETQPLQELIDIMIKNGVIV

SEQ ID NO: 4105 - protein, 248 aa, Apophysomyces sp.
MLDDLEVWGIEPGVTQVFVASNVCDPRAYISDNDTRYGSLVRWNTIAWLASQRQTPKSGNGKTCIVNHIQTKNHVSDRLLAFYGTDVQPLKLLNYRGRQKANDEMVKIFKNGGKRYGPHRDHGSDLEVFERQRKADGTLRWHSKNPATLCWRREVRQTSVSHQVARTLQDFSQGVQARCGSRGVEDMLVNEDDQSSKLHSVVCFEISKQSPFSLSMGSDLWVFTMDYEQKAEKQGRLPHPGTRSLLDE

SEQ ID NO: 4106 - protein, 802 aa, Apophysomyces sp.
MLKQKNQKKIEVANKKREAKRAALKEAQQEKSEEVICSTCDGVGHSRSSNKECPEHKPRRKVICELKLTSIIKTSLENTCKRPEFVATIRRVLNQDKPLPIISQDLCYSLFAIVADKGMHVDDNIRLAFQDFQRVVPSFDPAYFISRGYMTLIAEAAKQYEEGIRNHIVANFEKKTIQYLLIRFSDEKDKCYLGKTTVAARKALAQYVYNQVAGISAETNNWPSSVKRDKDLEKLISEIICALSFGPGPITVVELNATPHLYIPWMYIVLQRLEQKVFIQEEEPQDHVSNAYVHRKVHELIDTSNLSNKLIASLKDAVRSAIRRKIPLKLPKRFTKPLPNTEWAKLLDFVQSTVSAIENKTFRPLKYTDPRGEQQALGKLFCDSGTPIRLAVPSTKKVRRLYFDMFEMKKIGYRTIESLTIENSVFWDTIRTDGVDVEFIFKRPKRTASKTPLTPTDLQHLATDAIIWGVDPGVTDTFVAWRPKDNKDRDKKSERPILIAFGNGAISSSMKGKHPTSPRIIRNRLYQLCKQSKVHARVVMVDEYLTYQVCPKCNRRELKKKNERPDCRGQAGARLHAILQCGHRDRLWNRDVLDAKNILAVFKYMMANENKRSAFFRRLKKYNHFFAPWFCYSYIPGMYFYQPGISELPITHISPLAYMTSASGTVLAVPRQMVNRLMSSAVRSKQLPPGPPAQGAAPVPTIKWEYPSGPINSIEYDTQYYEHHVGLDARIIFLFVSEPYPHAIEFSSLCGHQTGTFTAPVRVQSSFATTNSKCYYQLQEKRRLWTSLTAPMETILEVDEEA

SEQ ID NO: 4107 - protein, 755 aa, Apophysomyces sp.
MAFLSSSAQQYEECIRNYVVASFRCKTIQYLFIVLSDEADERHDKLLIVQEREILAEHIYEGAAGESLVWPKAPPQAEELQSLTVRAIESISSYWGDKPVDNKTLNANPRVYIPWIFHILDRMEREVFVAEEKPQRYVSAAYVNRKVDEQLADTRALPNKLRTGLEVAVRQAIRKRSQLKLPKKIRLSKENENSLKECIKQTITAIGTDCFKPEKYTDPKGSRHFSILPVYSFQVRHIALNKQTFAYLLRLAGKPVNSYKPITPADLQHMLPDATVWGVDPGVTDIFVATDNAATEKHRLRRTSTKEYYDLCGYNRATQRRTQLLDSEPLTKTVVDKIPTVKTTNTDSLVSSITYRLQHHNQITEFYDREMRYAKLKFKTCTNKQQRLNEVAKRFFWGSRKYSKDSKQNCKKSCKSTQLSLNPNDQLEERSKPVIIAYGNAGFSGSMSGKIAGPTKKKILAEVKRLAGRRKSPTHVVMIDEYLTSQICPKCTTRKLENAHEKPTSDDCHGAKIHTRFTQAPLRLQSRFISQQGIRSKAAVGVFTWKSAVVFLGTGAGVLWYFQNEKSRVNKMLEEKKQKPQSYGKPKLGGPFQLTDAATGKTFGTEDLKGRFWLAYFGFTHCPDICPEELDKMAEAVDKIKADKALGELVPVFITCDPRRDTAEVVKEYVKDFHEDLIGLTGTQEEIKRVAKLFRVYVSSPPSSPDEEDYLVDHSIFFYLMDPEGKFLDCYSQNSTADEVVASFKNYHAEYLAQK

SEQ ID NO: 4108 - protein, 765 aa, Apophysomyces sp.
MLKQKNQKKIEVANKKREAKRAALKEAQQEKSEEVICSTCDGVGHSRSSNKECPEHKPRRKVICELKLTSIIKTSLENTCKRPEFVATIRRVLNQDKPLPIISQDLCYSLFAIVADKGMHVDDNIRLAFQDFQRVVPSFDPAYFISRGYMTLIAEAAKQYEEGIRNHIVANFEKKTIQYLLIRFSDEKDKCYLGKTTVAARKALAQYVYNQVAGISAETNNWPSSVKRDKDLEKLIKQKVFIQEEEPQDHVSNAYVHRKVHELIDTSNLSNKLIASLKDAVRSAIRSKNSLKLPKRFTKSLLNTEWAKLLDFTQSTVSAIENKTFHPLKYTDSRGEQQALGKLFCDSGTPIRLAVPSTKKVRRLYFDMFEMKKIGYRTMESLTIENSVFWDNIRTDGVDIEFIFQVSKTNCIQDTIDPNRLAVFGNYAIIWGVDPGVTDTFVAWRPKDNKDRDKKSERPILIAFGNGAISSSMKGKHPTSPRIIRNRLYQLCKQSKVHARVVMVDEYLTYQVCPKCNRRELKKKNERPDCRGQAGARLHAILQCGHRDRLWNRDVLDAKNILAVFKYMMANENKRSAFFRRLKKYNHFFAPWFCYSYIPGMYFYQPGISELPITHISPLAYMTSASGTVLAVPRQMVNRLMSSAVRSKQLPPGPPAQGAAPVPTIKWEYPSGPINSIEYDTQYYEHHVGLDARIIFLFVSEPYPHAIEFSSLCGHQTGTFTAPVRVQSSFATTNSKCYYQLQEKRRLWTSLTAPMETILEVDEEA

SEQ ID NO: 4109 - protein, 504 aa, Apophysomyces sp.
MSVKWLHYFCKNAEAYQDVPSVVDFLDAGGVECKDAEILVRQLPEAIQEEINEFVCRQRNDLEKILLKKIGDKITSSFQGHIVDLFDCLGATRTYQRPHRPLLRWTISCSGLKQSWYRYQYQATTVRKRGDCFTFVFDVATKVVTGGKQSSIVKKVNRCYKTKLHKRIPGTELPRYATKSRFLTDGLRLVAIYTDWCRSSFQQQRKVFLPEVRTLARRLREQQDNKPDSDLINYSGVVDLDLGETCAAASFYLPFDSERPGVQLTIKRNELYGRNGMNAAWLEDRKSKCGIDEDEAVLACGSQNSSLNKLLVYIRAWQYGDRGIRLRNFYANKSIMRRSWDTSLSLSSSLDKACNLVMKSTRKNVQLGKNNPSSKNRQKPVVFGFGMDGLRSGSRRGAPSSMDRRLMDRLRRHVRASDSDHKVCQVDEYCTSKVCCKCVQNGKVFFTKYLRRLSEEKDQEVIRILVCDVCEGVFRRGGNAAHNIASIASSIFMHHRRPAYFIRP

SEQ ID NO: 4110 - protein, 1014 aa, Apophysomyces sp.
MTPQGSKAAAPARKRGANDGRRSQTTKQNADERAAKRQARDDRKAQVDADRETPHKHCPTCIKASQVAVLKVTLASNEEERQRHRAEEQCCITKSRTHSRASNKDCTGYKERQAIKTKARLGGKVRPSTIKHGLAGLLQILPVAEQAQFLQGVETVVDYNRKLAIQAHLFLTYYLTYRLDAGLPIMPAFFDMHFVNGIFQLLLGGRFTSRAIFSQAIRDDLDTAFARYIEMFPNARCQKVPSPAARPPIAFSGLLASTATQIASTFTSHVDLKRGQAKAYAQYAYQASANDPQFPPEWPTLYHSGAIDDVLNDALQTAMDEATDEWAAIHDQIQQDRRRRQDQGRTRSSSVASTSTDPLPESMEAPSPAVSISTIGSMGASQLDISADSFSVETSTLTAYPQLFLPVLFRILQVMENWNVADQELPATPQPEATPVWTRHWLQSLPAWESLKHRRRTSLVRAITKLVNDQVLFDPARLPVGFDQASIDTMTEFIHQAQQELAEGTFTPPTYLVRSQARLFTIAPVAAFTRKYVKIDHETLGIILRHFGLGQHTAMPHTPVPADRPHANFNIIDLSKMKASENSLSTDGFATSITFKKAVPENPLPSLALDDIKEEHLAQCKIWGVDLGVSEIFVAVDGSDAGTYEDPSTAANAPHQVLKFSAAEYFTKAGMKKTNASILEWKRADGITAIEAALPSPKSARMSNIEDHIRAVLQALPRLLSHYGARYQQLRFHSYRGKQKIQKEMVDIFLTGGAKYNGDHHNVSEAVALSRTRADGQMRSKRKARPHIIAQAAAPKPNKWQKAMFQETHRDICNVVCVGDGAFGRRTFRGKVSGQANMSTKHTRPKCAAAAVSGIWTMLKSMSNPNCTPSYYATTVDACGSAIVTQRATSMPWHSWPSSPATTLKAGLKSSPENKDKKQSGSQKPATVKRLRYLRIQQRNGRKTLTTLQGLSQDVDIKRLLKAVKKSFACNGTAVDDPEHGEILQLQGDQRLKLAEFLVVEGIAKKADIKVHGF

SEQ ID NO: 4111 - protein, 492 aa, Chlamydomonas sp.
MRTQNATVALNLLVRQLFDGCADPRIPEFWDTTFVRQLLLGTGGTIKPVAEITQLFKDNPHLAPIEGRSFADGNIYTYAAKKLATNISNHLVTNLSKVVKRYLYDGAGLTTADAVQAQFLIYGWDLTKKKKKEKKNEVVDEEAVKRVVADVRKQLGLADDQKIGTMWYKSKPNLAPMLRMFVFANRALERAGKKLFNILPICRFKAHFITIDKTSVVGILNDADFGRGEKVTLEKLDWRAFLGADKLAGKNCTFTTTIDTDGLAINVHFTRPKNEGHSSEVEKPSLEGKRVLACDPGRSNIMYVVEKLDDGRFEPHKLTRRQYYAESGIFKANENSARWNKGVVNELKKLSTASPKSVDLGAFSLYVDAIASVRDALWEEYLCKRWREQTFRMYGGKKRSFAKFFNGLKLTPNTVLAYGASKFASGGKGELSVPVSRAYKECRARVRTFNVCEFRTTAVHWRDDTVIQTVVKSSGDGGRPVPPSTGRGSSEN

SEQ ID NO: 4112 - protein, 648 aa, Chlamydomonas sp.
MSETVVKCSLKRLLIAPPDIKEAIVKAVEKRVVQCSIRTQNATVALNLLVRQLFDGCADPLIPEFWDTTFVRQLLLGTDGAHKPVAEITQLFKDNPLLAPIEERSLADSNIYTYAAKKLATNISNHLVINIQKVVKRYLYDGAGLTTAGAVQAQFLIYGWDLTKKKKEKKNEVVDEEAVKRVVANVRKQLGLADDQKIGTMWYKSKPNLAPMLRMFVFANRALERAGKKLFNILPICRFKAHFITIDKTSVVGILNDAKFGRGEKVTLEKLDWRAFLGADKLAGKNCTFTTTIDTDGLAINVHFTRPKNEGHSSEVEKPSLEGKRVLACDPGRSNIMYVVEKLDDGRFEPHKLTRRQYYAESGIFKANENSARWNKGVVDELEKLSTASPKSVDLGAFSLYVDAIASVRDALWEEYLRKRWREQTFRLYGGKKRSFAKFFNGLKLTPDTVLAYGASKFASGGKGELSVPVSRAYKECRARVRTFNVCEFRTTAVHWRDDTVLQTVVKSSGDGGRPVPGVRRTRGGSLIPASGPRRSVRPGARPGMFTYDDVRLAPAPRGGGARAYFATFDHFDGREMRLSIDQRLVRDAVDGRIGTLLTNDTFYAIKGVRDGGDSSAVVVLGDAVAAAHTVRPVGLVGAINSTLIAIA

SEQ ID NO: 4113 - protein, 237 aa, Chlamydomonas sp.
MSFVPISSMTLMKLLSMGDKPLERIRGDGREEDHSKLWRKYFNIGGVETRALRFDDRILSDGKVRWRRPGHDRHRHHGVLHRGVKSYSSSHFSDAAGYKTSKRRTDKWNAETADLVRSIPPPTTSSVEGMHHHVRGYLAALPTLLQHRASKGYRSMRFLRFVGKQKAIEKVCDVIAPKGMTTVVGFGNWSNQGSGIRRTCSGPLKEIRKRLSRRTNVLFKNVDERNTSCTWLLPQAR

SEQ ID NO: 4114 - protein, 329 aa, Chlamydomonas sp.
MDVADYPKDVSIDECLHATTHRDAQNAGVDSGMTDIVTVAFSTGGVKSYSSSHFSDAAGYKTSKRRTDKWNAETADPVRSIPPPTSSVEGMHNHVRGYLAALPTLLQHRASKGYRSMRFLRFVGKQKAIEKVCDVIAPKGMTTVVGFGNWSNQGSGISRPCSRPLKEIRKRLSRRTNVLFKNVDERNTSCTCHGCFHKLVNMKADSVRWRKAVPGGDGSLADASAESTARVKTVVKNVKVHKVLRCSNSVKSAPNVRCGTTWNRDANAAKNLLLLLKTWMEGRERPAVFCVPSNNTVSQEANVRTRPIDPTSGSFGSARSLSLGPAFGS

SEQ ID NO: 4115 - protein, 425 aa, Thamnidium elegans
MKGKGKDVDNRQTDDFHLPSSKKLKRRFRGTKSKSANLEKFTRYIKTRATVSSTLYGYYGNESQKPTEVYFPGSSFEFRVDKKCNLYYGSLFVAKMRGVLPQPERESDTRSFKREVYYNYLQIMLQQPHITKRLEEEQKNKIFELAQQDNYVQKISVILENLQLLPFQKLKFFSKLFYYQDDNKLVHNLRGKFGQDAILVFGDWSAPNTKFHKPTRNKNLIAMLKKNGFTVYLVNEYKTSSFCPGCEHALEIFKTVPNPRPFKRAKMPKVTYHGLLSSFESDQPSFGLPRKKFISEESFAKEMAAMSLEPIVDPNRFPEARASNTYYNLSDEEEEENDSIMTLDSNGKPIINVDRNGLPMEIRPGENKPRIPDFVLKNSELTDPRDILAYQRIVQSLQNKPHKHKEIEVLNKPSDYFIPTSMDID

SEQ ID NO: 4116 - protein, 368 aa, Mucor plumbeus
MTMNPDHVAKVAKEFCYQMVCQGNPVWPKSIQLSEGEQSRIKEVCMPLSTHIDVQVTLKSLSASPGKFVRSFAYILSEYEREHLAHNPYDVRRLSLPRLFTISPSPSFRWEFVTISINSLCCFTKEKLPRGYNAQLDLFYKYFDFKGLGFKSIDDLRPNGLNNVLFSNTIKSDGFTVDFLFEKRRATALKKVKKDIENHDLVLEDFEYEKVERIYQPVFIDPGRKAVYTAAIGLDTNRKARAKKKINDSDVSGTVGTHDVTKSNKWKPSKFEYDRSKVPLIVFGTGMVGKDSVKLIVVPIDEFKTSRICNICKTDTLYKASHTRGFGVLVCKTCKTLWQRDVNASKNMMSIASSIWNQDGRPTAFKRI

SEQ ID NO: 4117 - protein, 264 aa, Mucor saturninus
MFLNGLYTDDYTCRVLFARKVLPSPPEENIRLELDDLSSEEVNKHFRSCTVDPGRRDPFVSYHGGSDIRRLSSSEYYNMGGNVTRMKEQQKHKHRLGIEKLKQTFLRLKLRLWSNLFSGFEVGNNSKMPLVVFGDGLKNKDLVKFKGLRHGISNKIYIQLNIREKIVDINEFKTSKICNCRLQPNLENLKVSQDDHTRKIHQVLKCITCNIYWNRDVMASKNMITIAHSIWNGNDRPTVFKRQTATSNVIASAHSRNLLKLSEN

SEQ ID NO: 4118 - protein, 887 aa, Bradysia odoriphaga
MKMQRYNDNLVMLRSFKVSLKKSGHKTPRIELTEIGITDEIPFAKKFNVVANDSPPKLRNVAAVGRRKNDNPKKPPVSSNDNDNSPPKRPNVAAVGRRKNDSPKKPPVSSNGNDSDDDFVATKKVYNSPPKLRNVAAVGRRKNDNPKKPPISSGALNAAILKAMPKERTSSTTSPAVTVDITSHRNTTSNIIGSGRKGNTQEVSNPLPIRQSTPTMEYGSEWDTDGEATIAQLKQMERKRQSKKAHSTSTKPEVKQTPVQSNRKRAASTDADEATTKRSTATKTQQDSADEAGDADEATTKRFDVTTVKQKLRPLIIDGETKINKQRVPDRLATEKTEVATKVFDIMNEQAVELSKLAILFSSLVYFDVYKTISDGENGNEIDRIFEKEFNWKDNSFHTMHFPIDTKALFDILKTLPQFKAILNQAEFLELQIDDDPNRKTTNPFWYFLFNIRKMETATKKFGGRITTNGSDVSIQYCKLRKEKELTKAEILEMASNRKRKHEVIDSDSESESEDDDDDDAKTEKTDPAIVSALKNITNMEDLSVSGVDLGIRNIAATVIRKWRNSSDGYEVHESNVLHKSKDYHYKAGFARRQRKSKKLHGEFDERYQRDRQSQPEEPSQRSPDFMKFLDSRLKWFNEGTATYMQRVVTNVKFDKFRSTQKQMTAMAKEIVGDENVHGKATTQQSKVRVVFVGNCSTPSNSSIKGHRRSPGNAPIVRYLKQIPRTFVDATIDEYCTTKKCSRCYETLDDVEFSKERLKLCHNCKLSENSTSTNLVSTYQRKRQIAKAMVPITRIYPKPTQFQRAQRLKMERTKRWSFGDKIRIAARNERKSTFYKVNTTATLNKLYWNRDGNAARNIVQLGLCDYNDCLPIEFTRDEAFQRPKKNN

SEQ ID NO: 4119 - protein, 235 aa, Bradysia odoriphaga
MEGSNRSWNFIAYTQFELKHLFDLQKTLLSPTLAHHKLKRSIFMEKTAVNIASQMAETGGIVRNKKVAYTEADKRKNRTEMDRRAKSSAHQLGKKSTLVIMGDFKLASDSPMKGHPRSAHTKFRPYLEKRCDVLTLNVYNTTKCCAICFKKSEIAKPPERFGQCLCNGNKRKVWHRDINADVNIRMLSERHLKGKQRPVQFTQKGKLKKQPHKLRRHQPETFKTHGGGGDQFIVI

SEQ ID NO: 4120 - protein, 482 aa, Bradysia odoriphaga
MTTITVVRRPSEFHQYSTTDQQRSKASSTAIISAAQLATAIGNANNSKKRATSPISQGSNEQQAEPKRRKVGIRFTAKKNPTLSYINEAYDSDIELFEDYLSMAIKSQFEAVSIGRNVDFIDNLTDSFRTLLEQSGIDRPSRSYLNNAFKKLYQRYEDTFRTNIKTHGKKRVQLLFRLWFVEEYDRNPTKQETKQMAAAANFIFNSRSKSSRTNVMVDQLVNRFMDYLPSTIPDDLNDQSKGFMQHLLWKNSWFRMYHNMARQNIRDRKCKKWTETFENKCKTEREQFNQQYQAVLSPRSRTYPSYIGHRLRHLDEAMEIYTMRKYTRTSFDKYKRAQSAMDRIVNDLVTTSVNSTQRCLFAVGGSEFPSNSPIKKYRRCPGVRKLVSALKKRPNCDVVFVDEYNTSQACARLFSVNLGRQTKKSSSTRDGNEKGIVIEIAQIAFRHRNFYRCQLRFKRKNHLRRFGSKCLNKRTAFSQSST

SEQ ID NO: 4121 - protein, 462 aa, Bradysia odoriphaga
MARKRKFEAATDSEESHSDDDTPSSGYTYSSHFDSKKPKTLRKDAKESEFTSVQQQDDIVDSDPEPQHICQTHIELVEIGISKNQPIVYKPERGNNWIGRSPDSQLIADSNFVSRKNHACLVFQPFVNKLHLKDCDSTNGIYVNDEMVSVVELNEGDLIGIGCSTDHHSINNPECVVLRVTQKVIHYPNEQSTKRPQPVEPITLSSSSEDELEAPINRTSTATQAYMHRQVTNLQFAKYRSTQTAMTQMAREIVGEVDVVGHKLEEKSCRIVFMGNCSTPANSTIRGHRRAPTGKKLSRYLQQRRNVIIISTPETNSTKNCSRCYEPLDNVESSKERLKICTKFCTPARDSMPAHHITTYTSKRSIKRKMKKVGTKPSQSERKSRVSMNRIDRWSIDDKIRIAKRLTLKRTIYVGPIPARHNILWNRDINAARNIGYLGLCRYGKFIDSSLNTTENTGVLTK

SEQ ID NO: 4122 - protein, 975 aa, Bradysia odoriphaga
MEYGSEWDTNGEATIAQLKQMERKRQSKKAHSTSTKPEVKQTPVQSNRKRAASTDEASDADEATTKRSKASKRSKATKTQQDSADEASDADEATTKRSKTKKAQQRKDDDENGCRAVIKTHLEEKSFLGNVFDKSIRRFTCPFTPCEANYSSFNNLKNHVKEDHDENLQKPIETDTNNWRRIQNSNNRFDVTTVKQKLRPLIIDGETKINKQRVPEPLATEKTEVATKVFDIMNEQAVELSKLAILFSSLVYFDVYKTMSDEQNGNEIDRIFEKEFNWKEMLLEFKTFQRNTAKAKNTRPDKHNTFFDLCRSYDVQTNFVETSQNAWNTIADTFATNFKTNITTHLYSRIRKWFAFKLRNGKKKKEVCGKENRKLINDKVYHTIKFLFDSEKCTQAEQVQHELISELQKICQFPNFNNGRKSYFERLRYDFKEDGDDDSGKPKRKRKCAARKTTTKKSKIKKKKTQNNGPRLHWFQMVPAMNSFHTMHFPIDTKALFDILKTLPQFKAILTQAEFLELQIDDDPNRKTTNPFWYFLFNIRKMETATKKFGGRITTNGSDVSIQYCKLRKEKELTKAEILEMASNRKRKHEVIDSDSESESEDDDDDDAKTKKTDPAIVSALNNITNMEDLSVSGVDLGIRNIAATIIRKWRESSDDGYEVHESNVLHKSKDYHYEAEFARRQRISKKLHGEFDERYQKDRQSQPEEPSQRSPDFMKFLTSRLKWFDEGTATYMQRVVTNVKFDKFRSTQKQMTAMAKEIVGDVNAHGKATTQQRKVRVVFVGNCSTPSNSSIKGHRRSPGNAPIVRYLKQIPRTFVDATIDEYCTTKKCSRCYETLDDVEFSKERLKLCHNCKLSENSTSTNLVSTYQRKRQIAKAMVPITRIYPKPTQFQRAQRMEMERTKRWSIGDKIRIAARNERKSTSYNVNTTATLNKLYWNRDGNAARNIVQLGLCEYNDCLPIEFNRDEAFQRPKRNQ

SEQ ID NO: 4123 - protein, 488 aa, Bradysia odoriphaga
MNRSSCLADRPLIQHHVYNYNMTHAEEWRQEDEKTKAACKTGKIKQKYPRIRPMNIVPIMKFRRQHVRIDSEGMFHVFFVLKQLPKKTDNNRRNITVVEFKARQHEFWSRFLNMERIEEICRGTKNKKEFAFQIQTDGVSVSLLYNAVPKRSVNAEAKIDRIRNNYRNNQYRYETSIDVWYNTYIAAIVDSGKELNVTLKSRRFHRTTKNNLRKKKFVRLAGDFEKAAALDRENRQLYPEMPTPTGSHMWWLYIRHSLKHWSRAIETYTVTAYAEMAFDKYTNTQKQIDGIVKLLTNGGEPTLLLIGGKKMDTFALCIHNYTLDNMNNKIIETVMGFMETRCKIVRGKESKLSKETRDLIAKRVELIKSGKRDSVEYRDITKIINKEMRSDLRKYNVKLAQETIEANCNMRVLRSKLMNAKKEIFKLRDKTGTIQSDRNAILNIAKEFYEDLFSSVRPKPTTTTEENQPERPIITNVGSEELPDITVT

SEQ ID NO: 4124 - protein, 1392 aa, Bradysia odoriphaga
MARANVNDHSTKTIVGIQSAPPLNVGNISAASLKGARHENRTIASMTMGEVGNISLSDSDSDFESRSKRKKQSQPTTASSKDPRKGIGGMARANVNAPPFNVGNISAASLKGARHENRTIASMTMGEVGNISLSDSDSDFESRSKRKKQSQPTTASSKDPRKGIGGMARANVNEKSHFPLGLPPAAWPPLNSKINSKKTIGKRSTKEQLSPVRKYHRIEPNSELDVAISNEDVESLDANITVSDIALLYSMEYIRSKYAEVTNVQTVPPSIGDTLRLLDYDEWPSFLGNYTLNSQSTLLFPLTDSTIRNVSSSSTHWYLVTFFRGEARYYDSQNRFGNTITYNLHEFVGKLSEFMSQDGDAALKPKLVDCICSRQTNATSCGLYVLMYMEQILQCFSNGTDWGNLSEFSEEAVNSKRIEWQNNLIEKFEKSKIVRVPPRSDQPMQPNVPMGNTPSLKWNVTKDDLKLLKNGGWLTDSIVNAAFEQMLIESANTSIGFVPVAVSAILRTTPRHQWREMLANVNNKHMVLFPIVHTSASAVGGSHIYLIAYWRSKCWYFDSRRNNYDRKHLSDINEFSENITRFMCGSGNMEIVQCSKQSNSNDCGVFTILNGKALVQHHASQSTTISITSSITSEQTIAERERLYKWLSTINETSSDMPESQRVVVNTPKSAKRKSQGTTKAARTKPVTTTTMFKRQKGVRPENQKSQECFTSVKMKLASILRDGSNGVAQLISSMSIKATKIASLASLLLLAKVNDNIDDRNFFEKDARDVVEDCFFEVLNPIKSRQGRRREPKFPEYISQRFAQTMRTHRIVRPDNNDMGNMFRYMHQMYSTNFKTNICEHGWKRIHNFFKIVPGSTKKKRRDTMNYLFNKTSKCQDDETLIAALDNLPNQPFHNWRRGALEKFQENWFAYVPLFVAIQRRNYEYNMQHAEEWRLENEELKAARNKEKLKRKYPRVRPMNIVPIVKFRRQHVRIDSEGLFHIFAALKQLPKQSDHIRLNINSVEFKRREHELWSRHFNMERIEEICRSTPNKQQFSYQIQSDGVSVSILYNAVPKQKANVGAKINRIRNNYLQNQYNYETSIDVGFNTYIAAIRRTISTGKEVNTTLKSKRFHRNTKNNLRKKKFVRLAGDFERTAARDRENRQLYAEIPTPCGREYWQYIAHSMKYWQDALNTYTIRQYAKMAFDKFTNTQKQIDSILRRLTNGKPTLFFIGGAEFSPNSIIKGHVRCPSIRKLTRAVARYQKSDCVFVDEYNTSQHCGLCLTKFEKHTKAYRFKKCRHCGTSKQEIPKAPTIVTRESKRNRQQHRQRTNAPAHRSRRFVSDSLIPTTQTTWQRDICACRLINYKGLNALFNRTIDQRLMRVTRSQSDSDENSSNDEEIPTHHGTSTIIW

SEQ ID NO: 4125 - protein, 1112 aa, Bradysia odoriphaga
MLMDIHCESDAEIDTCDEKKRAKRRIVTSSTSSPSRGNKSANLSTASPDGSSRAHSTLAGVEQMPVSSTSISNRTGGATSSKLVAAGAPVADPIRNILSYHGVTVSQTDMESLQPRQFITDKIIGFYFEYLQQEVYKGHHKILFLDPVVVQHLKISADAEQEIKHLDPQSKDFIFLPVNNSEHENDAGTHWLLLVFSRIDKKCFILDSTNNEEVLAKIYTLYERFKLLLEMDDAGFENYRALQQKNGYDCGLHVICNAENIAGHVNAFNKCRSMPKSVPQQIATKRKEIEEIILAKASSNTKTSSTPATRQTSLGNFFAKKNSKEQPVPVQSSKESKLDVIEADKADVIAKRQRVLASKFPSELTEAAAKSKSKKSLKLNPFGLELPSTLKRKRKNVKLKSTRKKKQSPSSDDNGQQTADAQQHEKKKKKSKPVKTPDINYKSNRWKRYEKDRRTSDNYYNWKTGIKESGPPKDVFLFESRKTMPQLKGYKPPKKLFQRKGPKPPRQGDKYDPKTEELFTVVLTLPKLLHNTESDAEWRKEVVLSQMQALVVELSKLSIEASYMIYHQYREAFDVEPYLQITQKPDFRGFFASLNKTAKGYNCDNIRRMAESYFTLRQQYGINGGRYYDGRNRTGSINMAADLYETSLKNNIIKHTYSRIRNFFKVVAPKTRSYATLAHLFYSDGGDCIPDKNLLQQLENVLGHTEDFRQLSSHWWKYIPVLLRLQRWRGLNNLKNFKVFPILGNRRHHVHIDSQALQQFLNGIHQLRYEDFQRESDQYWRRIFNVAKLETTNIIEGVDYGHKFNQYISTNGVSVSVSMKRRKRISTMCDDKFLQNVRNDLHNGEFDHIVALDPGARLSFAGIRRDCTTNQETSIRYSSSSYRYDSGQYNINAKYRAITNSVLKKVQTLRKNQPDKASSMANAVTFVQFNLSIFEELNQVMLSKTLAKLGFRRYVCRQKAISKLAQQLAFGTEKCNEIRSLRADRKKARRKKRDTTSGPIATPKALVFVGSTKISPIIKGYVKSPNNRIIKEVSQLATVVNVLEHRSTMLCSRCFLPCITARSPHRWQYCRTCTIKWNRDVNAGRNIMYLGLHKIANTDPDQGFSYGYQFPK

SEQ ID NO: 4126 - protein, 306 aa, Bradysia odoriphaga
RTYGVNSAYRYDSHQYAINRKYRQFTKQHAEQIQTARNQVQNKASCTADPTTYINFELEHFEANCNVLLHKHLAKLNFDRFVWRQRSTARLGRELAYGQRSITELEHHERRERNRKWRYRKKRQKQIEIDPNVPPDKYVKLKDRPTPPRVLLFVGDTDISPFIKGYVKSPNRRIIKETSKFATVVQVNEFRYTMLCSRCTQPCITARSPHRWQHCKTCMVKWHRDINASHNIMYLGIHRVNGTNPDQRFSKSFKFAKPARGYLTRSKKPKLHTRRDPLAMGRQKRQELRLQNNISPGSHPPNVKCP

SEQ ID NO: 4127 - protein, 295 aa, Bradysia odoriphaga
MGNCSTPANSTIRGHRRAPAPTGKKLSRYLQQRRNVIIISTPETNSTKNCSRCYEPLDNVESSKERLKICTKFCTPARDSMPAHHITTYTSKRSIKRKMKKVGTKPSQSERKSRVSMNRIDRWSIDDKIRIAKRLTLKRTIYVGPIPARHNILWNRDINAARNIGYLGLCRYGKFIDSSLNTTENTAFSRTMKKVKKMKKLPESHRTRTVSEDYVHTYDGETYTVPTYVTKSSSKNPYLQMGLKDYKHFEETVLMELEEKEEKKVEATMGSLLHKKAKNTEEDLVQGVPVDGWRP

SEQ ID NO: 4128 - protein, 375 aa, Bradysia odoriphaga
MALQQFLNSISRVKYETVKQSKTAENNLWRHLFNVDKWLPAHEDNNRPDDYRGPRFHKSFRTDGVTVHLTMVRRKKPLPDEEQFLSNISDRLASNHFDEIVALDPGGRLSFAGIRRDARTDAETTIKYSSSAYRYDSHQSAINRKYRQLNQIQTARNQVQNKASCTADPTTYINFELEHFEANCNVLLNKHLAKLNFDRFVWRQRSTARLGRELAYGQRYITELEHHKRRERNRKWRYRKKRQKQIEIDPNVPPDKYVKLKDRPTPPRVLLFVGDTDISPFIKGYVKSSNRRIIKETSKFATVVQVNEFRSTMLCSRCTQPCITARSPHRWQHCKTCLVKWHRDINASRNIMYLGIHRVNGTNPDQRFSKSFKFA

SEQ ID NO: 4129 - protein, 463 aa, Bradysia odoriphaga
MKHIQIDSYTLRLLLQGLDINPKKWNAKRTKKIGLTAKEFKENERECWLAYLNEKTLKRLERNGKKFKCSISTDGVAVSIQFESDKDPRPETFEKLKSKQQRKYKQFKNRYENGEYTRMIRLDPGYKFFLGGVVRDNRANEERLVKLSSRKYHNMTRQNIRDRKSENWTKEFEQTCRKERESHRLTHQSVMSPQSRTYLLYISHRLQHFNVGIELYTMKKYTRLQFDKYKRAQSTMDNIVNDLVVPVTSGERNLFAVGGTEFPSNSPIKKYRRCPGVRKLVDAVKKRPNCDVVFVDEYNTSQACARCFRKFKTTDQEIEQHKRWERKGHHHRNCSNCIPSSEFLPLPITIQTKESPETIRIKMLEQTHSVFTKFNVTYDEAKKHTQQVYYRYGEQLYDKTIEKQQQATYNSHQRSTALKCVWNRDVSAGRNILIKAICLISKLPCPINLQRPQTNNDSSDEGD

SEQ ID NO: 4130 - protein, 308 aa, Bradysia odoriphaga
MGRGVVRDEPTNEERLIKLSSRKYHNLTQQNICDRKAKRWTAEFEQRCRDEREEYLKTTHQVLSPTSTSYPDYILHRLRHLDEALSLYTTKKYTRLALDKYIRSQSTMDDIVNDMVVSPKTGKRNVIIVGGTEFPSNSRSKNPGIRKVMTTIKKRPNCGVISVDEYCTSQVCGRCFRSLKSTESDRKRHKKWEWKGHRLRICTDCKQNEQLLPLSSTIETKQSVSHIQVDVLQRTQRTFTKFNISAEEAALKETTIIVRNGPIDAAQMCLEQGCCSRTKYPDQGHLRDPKHAATDHVAATEKKKSGRS

SEQ ID NO: 4131 - protein, 212 aa, Bradysia odoriphaga
MSSNSRTYPAYILHRRLQHLEEAIALYTTRNYTRLAFDKYKRTQSAIDCTINDMVVAENRGDRNPFVIGGTRFSSNSPIKKYRRCPGIRKIVTAVKKRSNCDVFFVDEYNTSQVCGKCFRRFKSTPEETIMYMHWERQGQRLRKCSGRSPSEQYLSLPLTKESAHCVQIDVLKHALQLFTSTDMTYEEAKEETLKIYYTNGDNYYANGDRRT

SEQ ID NO: 4132 - protein, 210 aa, Euura lappo
MLRDSDIFQGQGGRQPRLVERQRFRDPPSPVGEDGERKGSCSKDRHQEARVGTSGSFEAIDELHAQAGRETKALRRRRENPNPAKERFRLSSFLGQFKIPKGTKGSPGTPLTKLLKRFNDRAHRGQKDIHIVIADEFRTTMNCSQCNRKCTKISTGRDRYLYCAPCGITWNRDVNAGQNILNLGLVRNGLVPDGYMPDAENFSRSRRVAR

SEQ ID NO: 4133 - protein, 454 aa, Euura lappo
MKVGAKHIRYNTRAVSELRRRVFGASETDLEDDETDPEDAEKKVWNTCFKVPNKFANAFAGSMSTNGVDVSLSCGRPPRDAADGNAEKRRKKSDGTADIRDGETDFVGVGRYPRPLEDYNRVAGFDPGLKYLAGEYEREKRRKRITGKVDVQAQDKLQKDFPDLNTKDPRNYSIITEYRLRDLEIRQPVYEKRCVTRLGWQKKMRVCKAVDDMVNYWVTGKLKNMKKIDSKREKAKKKHVEPKKRRRKRKKEEEEEKDRTMRALHESVGALSMDEDEDEDMIEVTKPKESTSRALHHEKDVDIIFVDEFRTTILCSQCNNSCVTSRSPDRYQFCKKCGITWNRDINAGRNILQLGLHRNGLVGDDYLPQPDNFTWQKRLATVEGLLSAAYRSSSLDQVDGYVVQIWLGFRLHPLLQQPTIFMAETEFQENRGFDQKAGKYFNVLDNGVESGLFL

SEQ ID NO: 4134 - protein, 981 aa, Euura lappo
MGRRKNTKDHDHPENPKGKKQPPPKIKVCAFCQKVGHTSRFSKQCGRSYRKQPSGAEPVPGTSTDSGTLAKDVVQCASCSKYGHKRASSKACDNYQPRAAEQSTGLATKDRQTYSIKCGFGRVCKNDVVFRLVNEDVRVISRFLIESSYLIEYCVRDPKRWLVGEWKTMDAQPDIRVMMMHLTRGYTPNANKRPGRQFYSLFAEYIAMRDVHSGGPLYENIHRGPLYDQACAEFTRNFATNVTTHAGVRVRNYLIKIAGMPRTDAYDSVDALFNTNARPVIIDEGNPFNDFDDLDFTEIDTKWWKFVGFYQRLQQRMLEPATEEVQQRDTERRAAAEERRLARAERARAREAENPRKGKSLAKAKKKKKPKVPAAEPQTWGKGFVLVPIYNVGAKHLLYDTGAVQKLLIRAEDESDGQHPFSESPEPVNRNPGAYSKDPLVLWKKCFQIPEKLIRDKKFACSVSTNGVDVSIHCARPKPDDEEDATPSKRRKLSTTGKAKTGEFDRRHPLRDHASDYTRMVGIDPGKKIACGGVIRTSDEDTDAVDKRAKNNQQRICLSTAAFRFNSGFYKREKQRVKLTGTVDLARQNLLATERFVGLNTKDPDRYAIVTEYRLRQFKLCQATYEKRSVTRLHWQKKWRTQQTTDRLVNYLSTGEDTQKQKGHARKRRRRRKKPADEQEEDPAMTLVEALAGNMSIDEDSDDGTSGAKAKADDNHDSSSDSDFEIRRPQSAKTGRGKGPAAKTVTRKPELALPGPSKPSTSFTPKPAERRKAKVVVVDNDYDFSSDSDFEIRRPKSAKTGRGKGPAAKTVTKKPAELALPGPSKPSTSFTPKPAERRKATMSSTPSTKRKSESGQGKVQTLVVLGQFKIPKGTKGSPGAPLTKLLKRFNDRAHRGQKDIHIVIADEFRTTMNCSQCNRKCTKISTGRDRYLYCAPCGITWNRDVNAGQNILNLGLVRNGLVPDGYMPDAENFSRSRRVAR

SEQ ID NO: 4135 - protein, 911 aa, Euura lappo
MPKKKPPPQKPEGEPPPPTQKLPRVRKKKLSAAEKAKLQCPTCKEFGHEDRSWKECSKHEAKCSSCGAWGHSRSTSKNCKFHTQRVKALLLGTECTETYAIKTGFRHVCTNDAFFDAVNEDVLEVTRFLIETSYFIEFCLRHKNRWLLQKWIESDTAPSLYTFAAHLAADSKPPADETFAAMLAQYRQLRGTDVPWYKTSKRTRLLDQNLVTLATNFATNVTTHARTRVRKYLQQMVGKSYDEAKKATEDLFATNTRPENIADELFDWDRLTQGLNFPEIDNEWWKFLDFYQELQKRMVKERTPAGVAKFEAARANAASYSSKSSGNGKTPANGKRAFKGRQALTSGKVQSASSAVDEASTSSAGLPAPETSEPRTQASAKGFVLFPIKSVGAGHIRYATDAVRQLCERVLHLTSGQLQKQLDKILEEKGEEKNTGNISKEIWNMCFKAPPNVAKAFAGSMSTNGVDISWSCGRPPRSDQIAGHATKKRKTNAGGAVTDDLQDRFVGVSKDVKMEDYDRIIGFDPGLKAAFGGIIVKNNQRGKDAEQRVCYRSSEFRYITGEFERAKRRKRVTDEVDKLNAELLQRDFPDLNTKNPDDYVNITNYRLRHFQLCQPIYEKRCITRLSWQKKMHVRKAVDDLVNYWVDGDLKREKKIEAQTEKKSKKKAPKTRRRKREKIRLGKMRKQTGKKPAIKKTTDKHPKVECGTSGMDVEMLQDLYDSVGSMSLDEDDGEVDMVEPEATNKSLRASRSRSTGIAEITLSTEPKTSATGGAVVRIEPEAIVETEKPKKSRFRSTSRGKGTTSKKPRRTLVIIGNVRIAGCMRGHVRGPLRLFEKRLLDRALRHQKDLDIIYVEEFRTTILCSNCNKRCVKSRSPHRSAVDAVAFFEPCVDEMIEWPLGWKTRVGIGDIE

SEQ ID NO: 4136 - protein, 1103 aa, Euura lappo
MGPKKIRVVDTTKKCPHCDKFGHVRSNHKECLKNPRNAAAATSSPGPSASRARPPTPRAGPSSAADDVPETPEDIEEYPDDDEDDVRRRSQICISCGASGHHNAQSRKCTKYRPSARVEHLGEYKTETYTVKCGFRGICGENKKVFDAVQEDVREMSRFIVEVSFLFEYCLRHKNRWLLERWMRSDTAPDLRPMARQLLDGGRRKRDPIHEKFQEMLHEYKAMRKLDAPLYDGYRRTSLYHSAIQELARNFATNVKTHAQARVRTYLQRIVGKDYKEAKADVEALFKSNIRPIIANDRLFDDFQTLDFTTMNKRWWKFLDFFQRLQSRMVEGPTETARAKMEKAREQRAKYAGPGKGKGKGKGKGKGKGKGTGIPSEAPSAVAQTSAKGFAVFPVYGLGAKHLTYSSEAVHELIVRLETRHGVGVVFPKSLGKTPSRWIDVRDDAWGKLWKKCFRLPKRIAPIFALSMSTNGVDVSLHCGRKPRQPLDGFPDREETTKGPSGPASKRRKKNDGSAETEKSGPQLRPVEEYTRFVGLDPGLKIVAGGVIREGIDCRDKDNQQRVCYSSAEFRYDTGFYGRKKTRERLTGDVEAQSADLLKEGSRFADLNTMDPRNYRLITEYRLRRFDLCQSTYEKRSITRLGWQGKMRTRQHVDNLVNYLTTGKLADVFVKKRKEALDKGPAKDLETPAEPAEPAEKTTKRKRRRKREKIRVNVMKRRAREEEIDQLSESTSHMSLDEDENEIPEPMECTPVTHDECSNDTFVLQQRKATFELGSRKSAREPDTSSSSDEGPVEKKPPKKRTKSKSTLKKPGDPSNAEWEWSKKTVAEPTVTTKPSQSTSKPNQTRRNDEDDVNKPSTSKFNLSLSKPHATPKFNLSLTKPQATPRFNLSLAKPQATPKFNLSLNKPHAPPKSNVSKSTPQPTPASTSAPQATPKPKSTPKPTKSKSTPKPTPTPKSDVHPRQKAPDLMETNQPRTPKGSVRQTGRTLVAIGEIQISKWMKGHARGPLRLIKQRLLDRAYRHQRDVDVVIVDEYLTTKNCSKCNNRCSVVSKSPHRFLHCNVCHVTWNRDVNAGVNILNLALVRRKLVPAGYMAASNNFDRGS

SEQ ID NO: 4137 - protein, 1670 aa, Euura lappo
MQICPAEPPSIEPPLSVIEAKNRLRKYVQPEKTKSYAPIRYYYKPDVPMEDDTTYRLSYWEGPNSPVEPFHPEDNLVVGGGEISDDTTHRLSYPGNWCVKPEVPITPCQRQLLGRGPMQDVTTQKHDYTWKLVPRTEPFKGTSNIRSPCATMSDDTTYRLSYYNYNCLSPIKSYAPIREYYKSDVPMDGCTTYRLSYWPTETPAKEEHPWSKKGEYHPPVNPMDTCTTYKLSYWPNCNEKPRKPFSNLDTENILNAKCCFDDNTTYKLSYFGCEADAKREPIRQSENLTLSQCPLSHDTTNRLSYPGNWCPKPESPITPCQRQLLGRGPMQEVTTQKHDYTWKCASGDGDKFRPIDNLEFSPLPLECCTTHRLSFMPINKKSIVPIKSYAPERRYWKSDVPMEGETTMRLSYQPVEVADKVDKPWGARLSYHPPTTPMEDNTTYNLRSVIMIATFLPALWFRCHQKHRRVHPQMTVRVIATVLAVASARPQREREAYTEEVSRGKDQIIDDRRSTTTVIPILQWNKQQDIDGTYKTNYETGNNINAEESGFIKSLQGSDGEMYPSLTQQGSYSYVSPDGTIISASYIADENGFRVVGDHLPTPPPVSEEIQKGLDLIYEGIRLRKEADEREAASKPAQQISAAQSVDRQRDDKERIYRHLLRYAHKRGQKGGLKAKSFHDLVCLQNFNEMGRRKNTKDHDHPENPKGKKQPPPKIKVCAFCQKVGHTSRFSKQCGRSYRKQPSGAEPVPGTSTDSGTLAKDVVRCASCSKYGHKRASSKACDNYQPRAAEQSTGLATKDRQTYSIKCGFGRICKNDVVFRLVNEDVRVISRFLIESSYLIEYCVRDPKRWLVGEWKTMDAQPDIRVMMMHLTRGYTPNANKRPGRQFYSLFAEYIAMRDVHSGGPLYENIHRGPLYDQACAEFTRNFATNVTTHAGVRVRNYLIKIAGMPRTDAYDSVDALFNTNARPVIIDEGNPFNDFDDLDFTEIDTKWWKFVGFYQRLQQRMLEPATEEVQQRDTERRAAAEERRLARAERARAREAENPRKGKSLAKAKKKKKPKVPAAEPQTWGKGFVLVPIYNVGAKHLLYDTGAVQKLLIRAEDESDGQHPFSESPEPVNRNPGAYSKDPLVLWKKCFQIPEKLIRDKKFACSVSTNGVDVSIHCARPKPDDEEDATPSKRRKLSTTGKAKTGEFDRRHPLRDHASDYTRMVGIDPGKKIACGGVIRTSDEDTDAVDKRAKNNQQRICLSTAAFRFNSGFYKREKQRVKLTGTVDLARQNLLATERFVGLNTKDPDRYAIVTEYRLRQFKLCQATYEKRSVTRLHWQKKWRTQQTTDRLVNYLSTGEDTQKQKGHARKRRRRRKKPADEQEEDPAMTLVEALAGNMSIDEDSDDGTSGAKAKADDNHDSSSDSDFEIRRPQSAKTGRGKGPAAKTVTRKPELALPGPSKPSTSFTPKPAERRKAKVVVVDNDYDFSSDSDFEIRRPKSAKTGRGKGPAAKTVTKKPAELALPGPSKPSTSFTPKPAERRKATMSSTPSTKRKSESGQGKVQTLVVLGQFKIPKGTKGSPGAPLTKLLKRFNDRAHRGQKDIHIVIADEFRTTMNCSQCNRKCTKISTGRDRYLYCAPCGITWNRDVNAGQNILNLGLVRNGLVPDGYMPDAENFSRSRRVAR

SEQ ID NO: 4138 - protein, 446 aa, Euura lappo
MVTVKTVAIKSWRVKGTRTTFEFRSRKSAREPDTSSSSDEGPVEKKPPKKRPKSKSTLKKPGDPSTAESEWSKKSVTEPTVTEKPAESTSKPTQPRRKNEDDVSKPSTSRFNLSLSRPHAPPKSNSDVHPRQKAPDPMETNQPRTPKGSVRQTGRTLVAIGEIQISKWMKGHARGPLRLIKQRLLDRSYRHQRDVDVIIVDEYLTTKNCSKCNNRCSVVSKSPHRFLHCEVCHVTSNRDVNAGINILNLALTTRTEQTRGKEDIQTEFYEQDADNYTIPIAGLETGVNCVCTFQGTWRRAIIQNVRPSGDVTLFFYDSGATRTAPSVSIRYLIACGLYDVRPIHPHLWTRTEMTQLYVRIVTICVLATVWEVDRENNCIVLSAVAEPRHARFANRFRSGRSAIARFDIPAWLEARSLAEFYLQIEVVNAVSEKQEFHLINAATEFL

SEQ ID NO: 4139 - protein, 981 aa, Euura lappo
MGRRKNTKDHDHPENPKGKKQPPPKIKVCAFCQKVGHTSRFSKQCGRSYRKQPSGAEPVPGTSTDSGTLAKDVVRCASCSKYGHKRASSKACDNYQPRAAEQSTGLATKDRQTYSIKCGFGRICKNDVVFRLVNEDVRVISRFLIESSYLIEYCVRDPKRWLVGEWKTMDAQPDIRVMMMHLTRGYTPNANKRPGRQFYSLFAEYIAMRDVHSGGPLYENIHRGPLYDQACAEFTRNFATNVTTHAGVRVRNYLIKVAGMPRTDAYDSVDALFNTNARPVIIDEGNPFNDFDDLDFTEIDTKWWRFVGFYQRLQQRMLEPATEEVQQRDTERRAAAEERRLARAERARAREAENPRKGKSLAKAKKKKKPKVPAAEPQTWGKGFVLVPIYNVGAKHLLYDTGAVQRLLIRAEDESDGQHPFSESSEPVNRNPGAYSKDPLVLWKKCFQIPEKLIRDKKFACSVSTNGVDVSIHCARPKPDDEEDATPSKRRKLSTTGKAKTGEFDRRHPLRDHASDYTRMVGIDPGKKIACGGVIRTSDEDTDAVDKRAKNNQQRICLSTAAFRFNSGFYKREKQRVKLTGTVDLARQNLLATERFVGLNTKDPDRYAIVTEYRLRQFKLCQATYEKRSVTRLHWQKKWRTQQTTDRLVNYLSTGEDTQKQKGHARKRRRRRKKPADEQEEDPAMTLVEALAGNMSIDEDSDDGTSGAKAKADDNHDSSSDSDFEIRRPQSAKTGRGKGPAAKTVTRKPELALPGPSKPSTSFTPKPAERRKAKVVVVDNDYDFSSDSDFEIRRPKSAKTGRGKGPAAKTVTKKPAELALPGPSKPSTSFTPKPAERRKATMSSTPSTKRKSESGQGKVQTLVVLGQFKIPKGTKGSPGAPLTKLLKRFNDRAHRGQKDIHIVIVDEFRTTMCCSQCNRKCTKISTGRDRYLYCAPCGITWNRDVNAGQNILNLGLVRNGLVPDGYMPDVANFGRDRRVAR

SEQ ID NO: 4140 - protein, 914 aa, Euura lappo
MGRRKNTKDHDHPENPKGKKQPPPKIKVCAFCQKVGHTSRFSKQCGRSYRKQPSGAEPVPGTSTDSGTLAKDVVQCASCSKYGHKRASSKACDNYQPRAAEQSTGLATKDRQTYSIKCGFGRICKNDVVFRLVNEDVRVISRFLIESSYLIEYCVRDPKRWLVGEWKTMDAQPDIRVMMMHLTRGYTPNANKRPGRQFYSLFAEYIAMRDVHSGGPLYENIHRGPLYDQACAEFTRNFATNVTTHAGVRVRNYLIKIAGMPRTDAYDSVDALFNTNARPVIIDEGNPFNDFDDLDFTEIDTKWWKFVGFYQRLQQRMLEPATEEVQQRDTERRAAAEERRLARAERARAREAENPRKGKSLAKAKKKKKPKVPAAEPQTWGKGFVLVPIYNVGAKHLLYDTGAVQKLLIRAEDESDGQHPFSESPEPVNRNPGAYSKDPLVLWKKCFQIPEKLIRDKKFACSVSTNGVDVSIHCARPKPDDEEDATPSKRRKLSTTGKAKTGEFDRRHPLRDHASDYTRMVGIDPGKKIACGGVIRTSDEDTDAVDKRAKNNQQRICLSTAAFRFNSGFYKREKQRVKLTGTVDLARQNLLATDRFVGLNTKDPDRYAIVTEYRLRQFKLCQATYEKRSVTRLHWQKKWRTQQTTDRLVNYLSTGEDTQKQKGHARKRRRRRKKPADEQEEDPAMTLVEALAGNMSIDEDSDDGTSGAKAKADDNHDLSSDSDFEIRRPKSAKTGRGKGPAAKTVTKKPELALPGPSKPSTSFTPKPAERRKATMSSTPSTKRKSESGQGKVQTLVVLGQFKIPKGTKGSPGAPLTKLLKRFNDRAHRGQKDIHIVIVDEFRTTMCCSQCNRKCTKISTGRDRYLYCAPCGITWNRDVNAGQNILNLGLVRNGLVPDGYMPDVANFGRDRRVAR

SEQ ID NO: 4141 - protein, 1101 aa, Euura lappo
MGPKKIRVVDTTKKCPHCDKFGHVRSNHKECLKNPRNAAAATSSPGPSASRARPPTPRAGPSSAADDVPETPEDIEEYPDDDEDDVRRRSQICISCGASGHHNAQSRKCTKYRPSARVGHLGEEKTETYTVKCGFWGLCAENKKVFDAVQDDVRQMSRFIVEVSFLFEYCLRHKNRWLLEQWMRSDTAPDLRPMARHLLVEGRKKRDPIHEKFQEMLHEYKAMRKLDAPLYDGYRRTSLYHSAIQELARNFATNVKTHAQARVRTYLQRIVGKDYKEAKADVEALFKSNIRPVIANDRLFDDFQTLDFTTMNKRWWKFLDFFQRLQSRMVEGPTETARAKMEKAREQRAKYAGPGKGKGKGKGKGKGTGTSSEAPSAVAQTSAKGFAVFPVYGLGAKHVTYSSEAVHELIVRLETPHGVGVVFPESLGKTPRRWIDVRDDAWGKLWKKCFRLPERVLPIFALSMSTNGVDVSLHCGRKPRQPLDGFPDREETTKGPSGPASKRRKKNDGSAETEKSGPQLRPVEEYTRFVGLDPGLKIVAGGVIREGIDCRDKDNQQRVCYSSAEFRYDTGFYGRKKTRERLTGDVEAQSADLLKEGSRFADLNTMDPRNYRLITEYRLRRFDLCQSTYEKRSITRLGWQGKMRTRQHVDNLVNYLTTGKLADVFVKKRKEALDKGPAKDLETPAEPAETTTKRKRRRKREKIRVNVMKRRARAEEIDQLSESASQMSLDEDKDEIPEPMECTPVTHDECSSDTFVLQQRKAEIELESRKPAREPDTSSSSDEGVFEKKPPKKRPKSKSTLKKPGDPSTAEWEWSKKSVAEPTVTEKPAESTSKPTQPRRNDKDGVNRPSTSKFNLSISRPLHAPLTKKPAESTSKPTQPRRNDEDDVNKPSTSKFNLSLSKPPPKFNLSLNKPHAPPKSNVSKSTPQPTPASTSAPQATPKPKSTPKPTPTPKSDVHPRQKAPDLMETNQPRTPKGSVRQTGRTLVAIGEIQISKWMKGHARGPLRLIKQRLLDRAYRHQRDVDVVIVDEYLTTKNCSKCNNRCSVVSKSPHRFLHCNVCHVTWNRDVNAGVNILNLALVRRKLVPAGYMAASNNFDRGS

SEQ ID NO: 4142 - protein, 934 aa, Euura lappo
MPKKKPPPQKPEGEPPPPTQKLPRVRKKKLSAAEKAKLQCPTCKEFGHEDRSWKECSKHEAKCSSCGAWGHSRSTSKNCKFHTQRVKALLLGTECTETYAIKTGFRHVCTNDAFFDAVNEDVLEVTRLMIETSYFIEFCLRHKNRWLLQKWIESDTAPSLYTFAAHLAADSKPPADETFAAMLAQYRQLRGTDVPWYKTSKRTRLLDQNLVTLATNFATNVTTHARTRVRKYLQQMVGKSYDEAKKATEDLFATNTRPENIADELFDWDRLTQGLNFPEIDNEWWKFLDFYQELQKRMVKERTPAGVAKFEAARANAASYSSKSSGNGKTPANGKRAFKGRQALTSGKVQSASSAVDEASTSSAGLPAPETSEPRTQASAKGFVLFPIKSVGAGHIRYATDAVRQLCERVLHLTSGQLQKQLDKILEEKGEEKNTGNISKEIWNMCFKAPPNVAKAFAGSMSTNGVDISWSCGRPSRSDQIAGHATKKRKTNAGGAVTDDLQDRFVGVSKDVKMEDYDRIIGFDPGLKAAFGGIIVKNNQRGKDAEQRVCYRSSEFRYITGEFERAKRRKRVTDEVDKLNAELLQRDFPDLNTKNPDDYVNITNYRLRHFQLCQPIYEKRCITRLSWQKKMHVRKAVDDLVNYWVDGDLKREKKIEAQTEKKSKKKAPKTRRRKREKIRLGKMRKQTGKKPAIKKTTDKHPKVECGTSGMDVEMLQDLYDSVGSMSLDEDDGEVDMVEPEATNKSLRASRSRSTGIAEITLSTEPKTSATGGAVVRIEPEAIVETEKPKKSRFRSTSRGKGTTSKKPRRTLVIIGNVRIAGCMRGHVRGPLRLFEKRLLDRALRHQKDLDIIYVEEFRTTILCSNCNERCLKSRSPHRYLFCQTCRITWNRDVNAGRNIQHLGLHRQALVGEDFLAKYLPKPGQFTRHERLLES

SEQ ID NO: 4143 - protein, 934 aa, Euura lappo
MPKKKPPPQKPEGEPPPPTQKLPRVRKKKLSAAEKAKLQCPTCKEFGHEDRSWKECSKHEAKCSSCGAWGHSRSTSKNCKFHTQRVKALLLGTECTETYAIKTGFRHVCTNDAFFDAVNEDVLEVTRLMIETSYFIEFCLRHKNRWLLQKWIESDTAPSLYTFAAHLAADSKPPADETFAAMLAQYRQLRGTDVPWYKTSKRTRLLDQNLVTLATNFATNVTTHARTRVRKYLQQMVGKSYDEAKKATEDLFATNTRPENIADELFDWDRLTQGLNFPEIDNEWWKFLDFYQELQKRMVKERTPAGVAKFEAARANAASYSSKSSGNGKTPANGKRAFKGRQALTSGKVQSASSAVDEASTSSAGPPAPETSEPRTQASAKGFVLFPIKSVGAGHIRYATDAVRQLCERVLHLTSGQLQKQLDKILEEKGEEKNTGNISKEIWNMCFKAPPNVAKAFAGSMSTNGVDISWSCGRPPRSDQIAGHATKKRKTNAGGAVTDDLQDRFVGVSKDVKMEDYDRIIGFDPGLKAAFGGIIVKNNQRGKDAEQRVCYRSSEFRYITGEFERAKRRKRVTDEVDKLNAELLQRDFPDLNTKNPDDYVNITNYRLRHFQLCQPIYEKRCITRLSWQKKMHVRKAVDDLVNYWVDGDLKREKKIEAQTEKKSKKKAPKTRRRKREKIRLGKMRKQTGKKPAIKKTTDKHPKVECGTSGMDVEMLQDLYDSVGSMSLDEDDGEVDMVEPEATNKSLRASRSRSTGIAEITLSTEPKTSATGGAVVRIEPEAIVETEKPKKSRFRSTSRGKGTTSKKPRRTLVIIGNVRIAGCMRGHVRGPLRLFEKRLLDRALRHQKDLDIIYVDEFRTTILCSNCNKRCVKSRSPHRYLFCQTCRITWNRDVNAGRNIQHLGLHRQALVGEDFLAKYLPKPGQFTRHERLLES

SEQ ID NO: 4144 - protein, 419 aa, Euura lappo
MDPRNYRLITEYRLRRFDLCQSTYEKRSITRLGWQGKMRTRQHVDNLVNYLTTGKLADVFVKKRKEALDKGPARNLETPAEPAEKTTKRKRRRKREKIRVNVMKRRAREKEIDQLSESASHMSLDEDEDEIPEPMECTPVTHDECSNDTFVLQQRKATFELRSRKSAREPDTSSSSDEGPVEKKPPKKRPKSKSTLKKPGDPSTAEWEWSKKTVAEPEVTKKPAESTSKPTQPRRNDEDDSDVHPRQKAPDPMETNQPRTPKGSQTGRTLVAIGEIQISKWMKGHARGPLRLIKQRLLDRAYRHQRDVDVIIVDEYLTTKNCSKCNNRCSVVSKSPHRFLHCKVCHVTSNRDVNAGINILNLALLIDFTEDFTHAKVYLYGKNAGIQLPGTFIISVFNVKEKTHNRTIKSLSTLEVQKG

SEQ ID NO: 4145 - protein, 939 aa, Euura lappo
MPKKKPPPQKPEGEPPPPTQKLPRVRKKKLSAAEKAKLQCPTCKEFGHEDRSWKECSKHEAKCSSCGAWGHSRSTSKNCKFHTQRVKALLLGTECTETYAIKTGFRHVCTNDAFFDAVNEDVLEVTRFLIETSYFIEFCLRHKNRWLLQKWIESDTAPSLYTFAAHLAADSKPPADETFAAMLAQYRQLRGTDVPWYKTSKRTRLLDQNLVTLATNFATNVTTHAQTRVRKYLQQMVGKSYDEAKKATEDLFATNTRPENIADELFDWDRSTQGLNFPEIDNECLVVDRWKFLDFYQELQKRMVKERTPAGVAKFEAARANAASYSSKSSGNGKTPANGKRAFKGRQALTSGKVQSASSAVDEASTSSAGLPAPETSEPRTQASAKGFVLFPIKSVGAGHIRYATDAVRQLCERVLHLTSGQLQKQLDKILEEKGEEKNTGNISKEIWNMCFKAPPNVAKAFAGSMSTNGVDISWSCGRPSRSDQIAGHATKKRKTNAGGAVTDDLQDRFVGVSKDVKMEDYDRIIGFDPGLKAAFGGIIVKNNQRGKDAEQRVCYRSSEFRYITGEFERAKRRKRVTDEVDKLNAELLQRDFPDLNTKNPDDYVNITNYRLRHFQLCQPIYEKRCITRLSWQKKMHVRKAVDDLVNYWVDGDLKREKKIEAQTEKKSKKKAPKTRRRKREKIRLGKMRKQTGKKPAIKKTTDKHPKVECGTSGMDVEMLQDLYDSVGSMSLDEDDGEVDMVEPEATNKSLRASRSRSTGIAEITLSTEPKTSATGGAVVRIEPEAIVETEKPKKSRFRSTSRGKGTTSKKPRRTLVIIGNVRIAGCMRGHVRGPLRLFEKRLLDRALRHQRDLDIIYVDEFRTTILCSNCNKRCVKSRSPHRYLFCQTCRITWNRDVNAGRNIQHLGLHRQALVGEDFLAKYLPKPGQFTRHERLLES

SEQ ID NO: 4146 - protein, 934 aa, Euura lappo
MPKKKPPPQKPEGEPPPPTQKLPRVRKKKLSAAEKAKLQCPTCKEFGHEDRSWKECSKHEAKCSSCGAWGHSRSTSKNCKFHTQRVKALLLGTECTETYAIKTGFRHVCTNDAFFDAVNEDVLEVTRFLIETSYFIEFCLRHKNRWLLQKWIESDTAPSLYTFAAHLAADSKPPADETFAAMLAQYRQLRGTDVPWYKTSKRTRLLDQNLATLATNFATNVTTHARTRVRKYLQQMVGKSYDEAKKATEDLFATNTRPENIADELFDWDRSTQGLNFPEIDNEWWKFLDFYQELQKRMVKERTPAGVAKFEVARANAASYSSKSSGNGKTPANGKRAFKGRQALTSGKVQSASSAVDEASTSSAGLPAPETSEPRTQASAKGFVLFPIKSVGAGHIRYATDAVRQLCERVLHLTSGQLQKQLDKILEEKGEEKNTGNISKEIWNMCFKAPPNVAKAFAGSMSTNGVDISWSCGRPPRSDQIAGHATKKRKTNAGGAVTDDLQDRFVGVSKDVKMEDYDRIIGFDPGLKAAFGGIIVKNNQRGKDAEQRVCYRSSEFRYITGEFERAKRRKRVTDEVDKLNAELLQRDFPDLNTKNPDDYVNITNYRLRHFQLCQPIYEKRCITRLSWQKKMHVRKAVDDLVNYWVDGDLKREKKIEAQTEKKSKKKAPKTRRRKREKIRLGKMRKQTGKKPAIKKTTDKHPKVECGTSGMDVEMLQDLYDSVGSMSLDEDDGEVDMVEPEATNKSLRASRSRSTGIAEITLSTEPKTSATGGAVVRIEPEAIVETEKPKKSRFRSTSRGKGTTSKKPRRTLVIIGNVRIAGCMRGHVRGPLRLFEKRLLDRALRHQKDIDIIYVDEFRTTILCSNCNKRCVKSRSPHRYLFCQTCRITWNRDVNAGRNIQHLGLHRQALVGEDFLAKYLPKPGQFTRHERLLES

SEQ ID NO: 4147 - protein, 1122 aa, Euura lappo
MGPKKIRVVDTTKKCPHCDKFGHVRSNHKECLKNPRNAAAATSSPGPSASRARPPTPRAGPSSAADDVPETPEDIEYPDDDEDDVRRRSQICISCGASGHHNAQSRKCTKYRPSARVGHLGEEKTETYTVKCGFWGLCAENKKVFDAVQDDVREMSRFIVEVSFLFEYCLRHKNRWLLERWMRSDTAPDLRPMARHLLVEGRQKRDPIHEKFQEMLHEYKAMRKLDAPLYDGYRRTSLYHSAIQELARNFATNVKTHAQARVRTYLQRIVGKDYKEAKADVEALFKSDIRPVIANDRLFDDFQTLDFTTMNKRWWKFLDFFQRLQSRMVEGPTETARAKMEKAREQRAKYAGPGKGKGKGKGKGKGKGKGTGIPSEAPSAVAQTSAKGFAVFPVYGLGAKHVTYSSEAVHQLIVRLETRHGVGVVFPESLGKTPSQWIDVRDDAWGKLWKKCFRLPERIVPIFALSMSTNGVDVSLHCGRKPRQPLDGFPDREETTKGPSGPASKRRKKNDGSAETEKSGPQLRPVEEYTRFVGLDPGLKIVAGGVIREGIDCRDKDNQQRVCYSSAEFRYDTGFYGRKKTRERLTGDVEAQSADLLKEGSRFADLNTMDPRNYRLITEYRLRRFDLCQSTYEKRSITRLGWQGKMRRRQHVDNLVNYLTTGKLADVFVKKRKEALDKGPAKDLETPAEPAEPAEKTTKRKRRRKREKIRVNVMKRRAREEEIDQLSESTSHMSLDEDENEIPEPMECTPVTHDECSNDTFVLQQRKATFELGLRKSAREPDTSSSSDEGPVEKKPPKKRTKSKSTLKKPGDPSNAEWEWSKKSVAEPEVTEKPAESTSKPTQPGRNDKDGVNRPSTSKFNLSISRPLHAPLTKKPAESTSKPTQPRRNDEDDVNKPSTSKFNLSLSKPPPKFNLSLNKPHAPPKSNVSKSTPQPTPASTSAPQATTPKPKSTPKPTKSKSTPKPTPTPKSDVHPRQKAPDLMETNQPRTPKGSVRQTGRTLVAIGEIQISKWMKGHARGPLRLIKQRLLDRAYRHQRDVDVIIVDEYLTTKNCSKCNNRCSVVSKSPHRFLHCKVCHVTWNRDVNAGINILNLALVRRKLVPAGYMPASDNFNRGSRTTGS

SEQ ID NO: 4148 - protein, 810 aa, Skeletonema costatum
MSFLHGTAVDQDVRMTTAKMGINTALSGWKRAAIKASFSNITTVASTLAVQGAHLHNFLITSHVVKGNELTYDMIVGQQYLYAVYNDNTFLRGVPLGEVGSEIPTHHRQASSLRNKITKINRRPALRDILKKLFRDDAQQQRALIGLNDLDSLMVSSRSNDVDPGIPQGLSEVINYIVRDQTTNIFNQLKPKAMGLIKDAVSAHIKNKEPIITPSAETALRKELMKRIKTPTLTQRVVLDESDLALVARLRNGFFDSPQFDDEDRSTKWLDDDYFEMITTPSKKKKMLPMIITHFVKCLMAQERLEDDFQPRPHVSELNAKKRSPLPLFQKGLQHINLDARTLYYLIKHAKNLEHNNGRSSTEPDDPHWPQSAKAFEKNRPLVRQWIHRVFNFHQWKRTRSGGGKWRVSDDKGIFATSNGVDISVLLRNRDDEVTRDRDDEVTLRQSNRMLNLSPAHDDDEEDDDDEEDDDVSMEIPDDRPTFVASIDPGRRNIIYCIITDTDGKFLKRVVLTRAGYYDTAKINAVRDRINERNKKEELKKMYTAFSDNHFLTSDDLLQVQAFKTYVSYHTTLWTEKTRKWWYRQRFHVFQNKDRVVDNLLNDIGADVTVDGVTYVLGEVRYEDGNFPSGRRTEQYVPCLFIKRRVKARFPTTDIDKHRTSQVCPDCHHRLLDVGMQDSINGSVQTTMGLKWCESVECEGNRLKTRDESSCYCIFQKGEDEYHEIFNHAGEGDEHYWDRPAERHVMHRYGMTGSRKNGRRKDDDDDYGMRMIGERLFDCRRDDMLWNGASPERSFDLYVRVSIAAEGGKG

SEQ ID NO: 4149 - protein, 1256 aa, Skeletonema costatum
MPIQVASTDHPSTASVTANNGAQQPLRRSPRLAANNAARNAANDDAHNATQSSTAAVATRCTTRCSAACASAAAAGDLRYSGVRKNSSGMNTGIQKNACDRLFNSLKADYRIQNLFTVEDLERALAKSDYVTVKPATVEDFFDYDKFLRMFYRKLPQQINQNHVFSCGSMEDAQGCTLGSDFKISLLRSFREADKAAAVIPQKCRKRNWWTALPERNHANEAEASLKRVDDLKEMCGDRDKLTVVKPPGLNPYKVVEMWSNFRPLVPLDKKDDVLYREPTAEEWAVVKKEKKLNKEKKVEVKKMKRETMETEDEVVGDDSRKAKKPRTTDSSVPNAFYRELQQVDGIINYDHITHPRRCYNGNWTEEERIAKHREHYLRTHICTVLGEAGTRATRQTIDLDAFTDDPEHFVSFITTRVQDTGELMKPIVYGGYKSNLMFLFKRYRYIPRAGYSVELKEYMDGVKRIANEARAAGENLCGMSPTEELVATKESRSRWEVDGADVECCVSAKFGATFTPKVSPKFWHNKTMADESPKYVAATCRMYLSSSIRNSLDIFSRGDTSKERIIGSITSVSHYAAKCRNRGSQVMAACALDCYNKREHTFPAITDGHGKATPFVSHAFNINLPLWKNKPYATEISEEVVSLMNQCYPITLVCDDEGKSAFSGYSRFNKSLTNTYATCAGNHARMNFFIYQNKTILDFLRSRGHKFPKISCKELIKIIKCRINNLDVEEDDANDDMLDELVPDENRDENGGLHRDDVEHFINFHRSFFSLRNIDAPIDDDWVEDDDNTGVIILYFVHLLTYQERLQRSHPTLKVQLFHPLPMHKMKPCHIEIEPISLFYILKRAGLEPGTTYWRQQPGHQPNQRIPFPSSERGCTDAMKRWWPIIFRTEIGRTSNRDHYTSQGIRTNGVMASLIYVKTLNPATTSDIQLDMEEVEDFQNVERGRPFSHDKGDHEDSSDASASHAAAESEGDDSSAVPENAEEDPPAPPQDDPEEPAQAFAGVDPGLVDLCLRTLSQAIRLRTRDEVWKRCWEQAFNKSILRAHGYCDGMKRKSLQDQMNIIKSNLKSDQCFENGAELQSVGFGNGSFGSSMPGMEGGVPTKAVKVTMARNFNTQHVDEWRSSSSCPCCHRQLKNLFHWYDGKRHYVRGIKFCASEQCKSHRFWHRDWVGAYNILVRHLVDLEVLDGDQIPFFLQRATTRHARWRPNKSERNLLELKTSRRVALPRKKMKRIVKKKRKAKKEKKRNRVKRRNDEC

SEQ ID NO: 4150 - protein, 294 aa, Cotesia chilonis
MVCPSCGKDDHQRSSSAKCLNRKRRIRETAIADDQEISVYSVKKGLTSVLCPLSDYKEAIARAIRDDVREMSRLSIELSYVAKKSEDALQNTTVSSVRNYSKVIAVDPGAKTPIVTCTRNGGDFSYKILKKERVVYESKECHRARKRLRFLKDIEDRIKSDRESTEQEIGLELTRKSQNAEPYTRFQLKWFDEKQRIYEQRRVQRLKFDKYINDQKMLHKIVDECFGKEPDTLVVYGAGFGFMNKGTFKSHRKFRHNDVIKIIKQRRNLSFDAAAWAVKYRITKFIPGSLESVE

SEQ ID NO: 4151 - protein, 599 aa, Cotesia chilonis
MVCPSCGKDDHQRSSSAKCLNRKRRIRETAIADDQEISVYSVKKGLTSVLCPLSDYKEAIARAIRDDVREMSRLSIELSYVVNFFYKHYSHREDFHILFPKFDALQFTYALKGVKYKLNDPDNVISTYKSIRNPNNLYDGRLRSFTIMQIAKQYSTVLETNIATHAFKRIKRYMYHKFGESMDKSEVHSSTYDAYYNGVCKSNGIGEWFNENRINSKEVSKNFWKFVPLFLQIQHEMYDQGKLSFNVFPIYSHGLKFITYDSRCIHELLRRVDSSNTPSSWPEFSENVTMYWNRHFTLPRNFGYSFSTDGVSVCLSMNRIVQKFNSKKAKKSEDALQNTTVSSVRNYSKVIAVDPGAKTPIVTCTRNGGDFSYKILKKERVVYESKECHRARKRLRFLKDIEDRIKSDRESTEQEIGLELTRKSQNAEPYTRFQLKWFDEKQRIYEQRRVQRLKFDKYINDQKMLHKIVDECFGKEPDTLVVYGAGFGFMNKGTFKSHRKFRHNDVIKIIKQRRNLSVYVINEAYTTKNCSYCHDRDRIQQKLSVSKSPHRYVYCSVCRKGIHRDKNGAKNILLKYENKLPISLSSVGTDMNLVDGVIS

SEQ ID NO: 4152 - protein, 706 aa, Listronotus oregonensis
MVFCSSCLQTDHSRSSSARCLKRKRRIRERDLKTYDEALEIYTIKKCLASTVCPLLATKTQLLQKIQQDVREVSRLSIEMSVLVNLFYKSYFSVCPTRAIFYQFFPKFSPLHFMYVLQDKRNQIYDPAKVIDAYKAKRQGSAYIGGCRSYIIQEAAKQYETVFHTNITTHMFSRVKRYLRLLLPQETPAKIHRQAFQFYYDSNNRSPTEGTGPENLASPATNDAVDVIKQFFRDHNLDARSVTKDPWSYVYLLLAMQQKFEITENERSIQVFPKYSHGCKYIRYTSMGLYELLRSIKEPDVPGDAVKFREDAPKYWRRYFSLPRNDKNFGYSISTDGVAVSLSMNRTIKKTKKTKRGAHKKPASPTTTITVDTDTFVPNNTTRKLTRILAVDSGAKTPIVTCDDSLQYQILRKEQVAHETKDYMRKQKRAKWTRTIDKKINIEQEAVGFDKTSSRSIQYVHFYTSFFLRHFEEKQQCYERRNLLRLKFDKYVHQQKLQHRLIRKYFSRPNEHSLVLYGAGYQFMNTASFKGHRKLGHNKLVACMRRYYTSTITCVDVDESYTTKTCSYCRRTSGGRTITNVQVAKKHGHRYLFCSKCHKGIHRDKNGAQNILLKFVQKQFVGLLSWIDKDLSPDNAGLGRHVVNGENRNSFSFLTGAKGLFSFAPMALKQMIWFCVSNTYPRSSCLRINNLLSCPRNSVRTRRSIM

SEQ ID NO: 4153 - protein, 673 aa, Listronotus oregonensis
MVFCPSCLQTDHLRSSSARCLKRKRRIRERDLKSDEALEVYTVKKCLASTVCPLLATKPQLLQKIQQDVREVSRLSIEMSVLVNLFYKSYFSICPNRAVFYQFFPKFSPLHFMYVLQDKRNQIYDLAKVIDAYKARRQGKAYVGFCRTYIIQEAAKQYETVFHTNITTHMFSRVKRYLGLILPNETPAKIHEKAFELYYPSSPMGTKNNASLSATDEAVDVIKQFFRDHNLDVRSVEKDPWSYVYLLLAMQQKFEITENERSIQVFPQYSHGCKYIRYTSTGLYELLRSIKEPDVPGDHVKFREDAPKYWRRYFSLPRDKNFGHSISTDGVAVSLSMNQTITKTIKKTAKTRKFSSHIVEPAFVPNNTTRKLTRILAVDPGAKTPIVTCDDSLHLVLYGAGYQFMNTASFKGHRKFGHNKLVACMRRYYASAVTCVDVDESYTTKTSSYCRRTSGGRTITNVQVAKKHGHRYVFCSKCHKGIHRDKNGAQNILLKFVQKQFVGLLSWIDKDFCLATPPASAGMSLRARIAEPSALHATEELVLQVGELSQYRRPAAFCQSIYKQLAAETLVEQVLAPPPPSGKRQYKETADDEAMAFVRQLGAWLTRIIVKTTRLNARLPIGRLVKKFRWDEVELCEPFHDDSLIRACIVKWAADAHVPIDDRHGLMGVEVAT

SEQ ID NO: 4154 - protein, 521 aa, Listronotus oregonensis
MVFCPSCLQTDHLRSSSARCLKRKRRIRERDLKSDEALEVYTVKKCLASTVCPLLATKPQLLQKIQQDVREVSRPSIEMSVLVNLFYKSYFSICPNRAVFYQFFPKFSPLHFMYVLQDKRNQIYDLAKVIDAYKARRQGKAYVGFCRTYIIQEAAKQYETVFHTNITTHMFSRVKRYLGLILPNETPAKIHEKAFELYYPSSPMGTKNNASLSATDEAVDVIKQFFVIIISTSDPWKKIRGHTFIYCSPCSKSSKSPRMNGAFKFFRSIRTVATVDPGAKTPIVTCDDSLQYQILRKEQVAHETKDYMRKQKRAKWTRNIDKKIHIEQEAVGFDKTSSRSIQYVHFYTSFFLRHFEEKQQCYERRNLLRLKFDKYVHQQKLQHRLIRKYFSRPNEHSLVLYGAGYQFMNTASFKGHRKFGHNKLVACMRSILRFGGNVRGRGRVVHHENVQLLPSNQWRAHNHQCSSIHRDKNGAQNILLKFVQKQFVGLLSWIDKDFCLATPPASAGMSLRARIVTLSAS

SEQ ID NO: 4155 - protein, 917 aa, Listronotus oregonensis
MDLSSRSESKSPVSKHSGGGPETQTHIKKRQQQQRKRASRLRYFKRTRKLLVAVSQLLLLFRRNIARWQKKIDPPPPLPLVNTAKHSSGPPSTLDTIVYTTAPSIGACLRDYSAHDTNEALDLRAHTNSYTRRHPILNSLLESDAPRLTLSRSVVPYRDHLCYAKSALTCKKNLLRVDETRMVFCPSCLQTDHLRSSSARCLKRKRRIRERDLKSDEALEVYTVKKCLASTVCPLLATKPQLLQKIQQDVREMSRLSIEMSVLVNLFYKSYFSICPNRAVFYQFFPKFSPLHFMYVLQDKRNQIYDLAKVIDAYKARRQGKAYVGFCQTYIIQEAAKQYETVFHTNITTHMFSRVKRYLGLILPNETPAKIHEKAFELYYPSSPMGTKNNASLSATDEAVDVIKQFFRDHNLDVRSVEKDPWSYVYLLLAMQQKFEITENERSIQVFPQYSHGCKYIRYTSTGLYELLRSIKEPDVPGDHVKFREDAPKYWRRYFSLPRDKNFGYSISTDAVDPGAKTPIVTCDDSLQYQILRKEQVAHETKDYMRKQKRAKWTRNIDKKIHIEQEAVDLTRLHRAPSKKQQCYERRNLLRLKFDKYVHQQKLQHRLIRKYFSRPKEHSLVLYGAGYQFMNTASFKGHRKFGHNKLVACMRRYYASAVTCVDVDESYTTKTCSYCRRTSGGRTITNVQVAKKHGHRYVFCSKCHKGFLPGNAAGLGRDVVKGENRNSFCFLTGAKGLREAILSQSGSPEEARVCDDNESALDSKRLSTAAAVPAALGEQSDFSFLPSSIGPFPPLPPWITPARNISFIICCLQFLPYAQFRNYGSWYFIRRPVNLIADSVKKFLAEHAHSVVLKSWYTTKPYFTIRNEILKHMPQLQMLRFCTLITRLPLRNTEEQQILNRQLCDVVDALLLPPSCH

SEQ ID NO: 4156 - protein, 576 aa, Listronotus oregonensis
MVLPRQGWFFALRVCKPTTCAPAVLVVSNKIQQDVREVSRLSIEMSVLVNLFYKSYFSICPNRAVFYQFFPKFSPLHFMYVLQDKRNQIYDLAKVIDAYKARRQGKARVKRYLGLILPNETPAKIHEKAFELYYPSSPMGTKNNASLSATDEAVDVIKQFFHDHNLDVRSVEKDPWSYVYLLLAMQQKFEITENERSIQVFPQYSHGCKYIRYTSTGLYELLRSIKEPDVPGDHVKFREDAPKYWRRYFSLPRDKNFGYSISTDGVAVSLSMNRTITKTIKKTAKTRKFSSHIVEPAFVPNNTTRKLTRILAVDPGAKTPIVTCDDSLQYQILRKEQVAHETKDYMRKQKRAKWTRNIDKKIHIEQEAVGFDKTSSRSIQYVHFYTSFFLRHFEEKQQCYERRNLLRLKFDKYVHQQKLQHRLIRKYFSRPNEHSLVLYGAGYQFMNTASFKGHRKFGHNKLVACMRRYYASAVTCVDVDESYTTKTCSYCRRTSGGRTITNVQVAKKHGHRYVFCSKCHKGIHRDKNGAQNILLKFVQKQFVGLLSWIDKDFCLATPPASAGISLRARIVTLSAS

SEQ ID NO: 4157 - protein, 746 aa, Listronotus oregonensis
MEHASPPTPIEGASEMTIDQAFNAMSSLTVMFTGNFITLEIKMKDHREIAFNILKAFLNKACKILEASFYLWSLLKATAAHRXLVQVHALEPNGTIQVHDDGNINTVVGLDDRMISCFGENTAQSKRWVTKRRHVQIGLALSRPVVPYRDHLCYAKSALTYRRNLLRVDEVRNIVRKESDSARCLKRKRHIRERDLKNDEALEVYTIKKCLASTKIQQDVREVSRLLIEMSVLVNLFYKSYFTVCPTRVMFYHFFPKFAPLHFMYVLQDKRNQIYDPAKVIDAYKAKRQGSAYIGGCRSFIIQEAAKQYEAVFNTNITTHMFSRVKRYLRLLLPKETPAKIHRQAFQFYYDSNNSSPTEGTGPENIASPATNDAVDVIKQFFRDHNLDARSVTKDPWSYVYLLLVMQQKFEITEKERSIQVFPQYSHGCKYIRYTSMGLYELLRSIKEPDVPGDAVKFREDAPKYWRRYFSLPRNDTNFGYSISTDGVAVSLSMNRTIKKTKKTKKAAKKNPSPTTTITVGTDTFVPNNNTTRKLTRILAVAPSAKTPIVTCDDSLQYQILRKEQVAHETKDYMRKQKRAKWTRNVDKKINREQEAVSFNKTSSRSIQYVHFYTSFFLRHFEEKQQCYERRNLLRLKFDKYVHQQKLQHMLIRKYFSRPNEHSLVLYGAGYQFMNTASFKGHRKFGHNKLVACMRRYYASTITCVDVHGRVVHHENVQLLPSKQWRAHNHQCSSREKTWTPLCVLQ

SEQ ID NO: 4158 - protein, 626 aa, Listronotus oregonensis
MVFCPSCLQTDHLRSSSARCLKRKRRIRERDLKSDEALEVYTVKKCLASTVCPLLATKPQLLQKIQQDVREVSRLSIEMSVLVNLFYKSYFSICPNRAVFYQFFPKFSPLHFMYVLQDKRNQIYDLAKVIDAYKARRQGKAYVGFCRTYIIQEAAKQYETVFHTNITTHMFSRVKRYLGLILPNETPAKIHEKAFELYYPSSPMGTKNNASLSATDEAVDVIKQFFRDHNLDVRSVEKDPWSYVYLLLAMQQKFEITENERSIQVFPQYSHGCKYIRYTSTGLYELLRSIKEPDVPGDHVKFREDAPKYWRRYFSLPRDKNFGYSISTDGVAVSLSMNRTITKTIKKTAKTRKFSSHIVEPAFVPNNTTRKLTRILAVDPGAKTPIVTCDDSLQYQILRKEQVAHETKDYMRKQKRAKWTRNIDKKFTLNKRPWDLTRLHRAPSKKQQCYERRNLLRLKFDKYVHQQKLQHRLIRKYFSRPNEHSLVLYGAGYQFMNTASFKGHRKFGHNKLVACMRRYYASAVTCVDVDESYTTKTCSYCRRTSGGRTITNVQVAKKHGHRYVFCSKCHKGIHRDKNGAQNILLKFVQKQFVGLLSWIDKDFCLATPPASAGMSLRARIVTLSAS

SEQ ID NO: 4159 - protein, 640 aa, Leptopilina boulardi
MTVMFRLMWMLIVVSRVRRQLFPPEEEEQSPKEPNASDVSDFVYRPNAPCQDDDDDPQLFPPEEEEQSPKEPNASDVSDFVYRPNAPCQDDDDDPQLFPPEEEEQSPKEPNASDVSDFVYRRNASDQQVSSTESRQPELPILHDENTKMSIDGESQTFAFNASDDEKTSKYKEPTEEEEDDEEMEVNRGNIIKTKLDNLFKHNECDSETLKTLNVENLDFRDLGKRNKCHKFLIFFHRLQGYFARQGRKSFLLVPIMKPGLKYITYTNTGLADLEKELLKVSSDYTPIEKASEQSKLLYDEKTALGREAKNLERENSPQNAKRLSSIKSRVKEIANQLTPIKEEMKLENKRHQNVKDQRRPDRENVNDQRHEQPETPDLTQYKVLKGLDPGLKFAFGGVERNMTPEFNIKSVDKPIKISTKSYRWQTQENSRRAILHKHTKDYKKFYHDLQVCDKYRGKVNHKDPRQIFISTEYLLESFNRNQPFQEKRKVAALKWDKYMCVQRETDYLANYLVGDTNKKQLLAIGSPKISPWMKGHVRMPLRKVMKRLIEKQSKYENLRIVFVDEYLTTKLCSCCNKRMKIKINRTARCATCKTSWNRDVNAGKNILNLALVRLGIIDKTLLPHWDKFRALWKLRDWDV

SEQ ID NO: 4160 - protein, 480 aa, Leptopilina boulardi
MEVNRGNIIKTKLDNLFKHNECDSETLKTLNVENLDFRDLGKRNKCHKFLIFFHRLQGYFARQGRKSFLLVPIMKPGLKYITYTNTGLADLEKELLKVSSDYTPIEKASVMFSKDQISAQELKHKNIITPLKEQSKLLYDEKTALGREAKNLERENSPQNAKRLSSIKSRVKEIANQLTPIKEEMKLENKRHQNVKDQRRPDRENVNDQRHEQPETPDLTQYKVLKGLDPGLKFAFGGVERNMTPEFNIKSVDKPIKISTKSYRWQTQENSRRAILHKHTKDYKKFYHDLQVCDKYRGKVNHKDPRQIFISTEYLLESFNRNQPFQEKRKVAALKWDKYMCVQRETDYLANYLVGDTNKKQLLAIGSPKISPWMKGHVRMPLRKVMKRLIEKQSKYENLRIVFVDEYLTTKLCSCCNKRMKIKINRTARCATCKTSWNRDVNAGKNILNLALVRLGIIDKTLLPHWDKFRALWKLRDWDV

SEQ ID NO: 4161 - protein, 1602 aa, Leptopilina boulardi
MKKIKGSSKGKPPSAPFNVRVDDVGENYIDISWSSSPAQRKDDLVITNYIVELGEERRKLQPVLIVKAPQNSGRISKLEINKTYTLGVRSINSHGLSSDVCQPSVRVQMPSAETEGENRNSNVDHKVVSVELLIPLRREDPNISLPEPEYLNVQSLGKNFVCLAWHVDEDQQNDVDEYLIEWKTVEEDWTISTTIKPAIPTGIVEGLIKGQKYQLRVRAVNGEEKSDEGSSTVWLLPIQEKSPPDAPCDLIVIGKVEKNAKLTWTIPSILNTSSITGYIIEVWENGVWKISSLHESVETEKRIYGLNMNKQYKFRIRAYNKHGVSSICNESAEQTAMRYPSTSKDDASGFARPNRPVTSGRKATSNITETIDEHKRKLKVVEKLQEGIQKRKQAELIAEKDMRKKEEASAANADRDGSTDSLISQLSSNPTTPTSNEKKKQRVSESPEKKLSIFKRLFSPRKNEENTAKFYLEEQSSRNETQSSASKDEECAESDDIQKAIFASLTDQKIQKTKRQKHKIIFDGTQPSTSRQGMYDPDDDDDDDTNSTASVTSGRRRRLSTNFAPVNEDSSCSSFTGKFKILDLDLRSCEEMLVDAEHEAMEIDQQQPATDSSLKKRKVASTDKGTPPVIKKAKKISRHSSPTAAGAKDRVTKLKEDKIKQVEKKVEGKRKQQPSKPTTSKAKNRGGNASDDDEPMIVDESSETCEEEGKSSKERMKESNKKKGKLKARIQKRKVQKSYAIYMSLNSILQKDDNNVMKNKIEHDVRNSSRMKILTAIFVNYLMNKPDCRLAEEYAITGFEHYRIMNCFKERTENVYNNCKKKDPELYQLFEEFKKEMADEENEIDQLLFKKFEELHGKKKWWQKNQERLEEYNKFRIEMLTIVNCKFETDLLLQASREMDKDLRVHLHQQGPKMLLKYLKFKEFGIPQQEESDKKKVPEKDKKLVEKKTKKNEKRLENFKKKGNQRKEENQRREGIIPTSEELKQARKNKQQSAREKAKAAYTKKPCKNQEIKKITKQLKRDENKSEKERERNQRERIRKKEEKIEKRKQKNENKEQIFTFKKSGKKECWTSKEMKEKNKNVEKALINLLIYDMCYDDTLYGYLEDIQRKTEELKEIRLKREKEKEEKKKKKVNQEQNDKGKKEKKLEKIEKEEVGLLNFQDLDIPHLCYKFLPLFMRMQRELVDSGAKGFVLFPMKRFGLHHATYTETVLERDVLNYLKNLTTESTEKEQVDKIREKLIKVDPTEREKEKNVAKLKKKYDNLKTLWEALFDLKKVKDKHKNKRACSVPRCMQTDGVKVSLIFDLKKEKQEEETLPSSGNQKKTKKKKKIKYQRFVGLDPGLKAMFGGGMREDDPHIKKDERTKKVDKKQHTLIYANTKTFRFRNGELRRKSLLHKYSKDIDERYNNFMKKNEKYNKVDKNDPTKYLLLAKFYLKQFEIKQDKLTERCFRNLKFNKLIMVQREMDRVVNFIMGDNVKKEPCFVAIGSTKINPCMKGHVKTPIMKIEKRLRERSKQVGEERLKVVSAYEGYTTKMCSSCNQKNIVSRSPKRYAFCQNCHVVWNRDVNAGINILNIALINEEILEAADIPNSEVFPGIISATDM

SEQ ID NO: 4162 - protein, 522 aa, Leptopilina boulardi
MKIIKTKLDNLLKYNECDNETLKALNLENLDFRDLKRRKECHKFLIFFHRLQDYFAREGIKSFILVPIMSPGLKYITYTNTALKLLETELKKVAPDYICTKKASEKFTVNEIAAQELMHKDIISPLKEKSKLLHAEKTGLERNFQYLEKANSPKNAEELSNIKNQLKEITKKLTPIKKEIQLENKRHQDIKNQRRPEKINENDERWNNMFDISKIKVNKDKLKFSKTIMTDGVAVSVIYNLVKPKNITNFSPLQQQESRDLTKYEVFKGLDPGLKFGFAGVERKMNDNFDIKCIDKHIKISTKSYRWQTQENKRQSILYNETKNYKKYYHDLQVSEKYRDKVNHKDPQQILISTEYLLTALKRNQPYFEKRKIAALKWDKYMSVQRETDLLANYMVGDVKRKQLLVIGSPEISPWMRGHVRMPLRKVVRRLIEKQSKYPNLRIVFIDEHRTTKLCSTCNENMDIFRNRTAYCASCKISWNRDVNAGRNILNLGLVKLGIINKEQLPNWSDFRALKNIQDWNE

SEQ ID NO: 4163 - protein, 679 aa, Leptopilina boulardi
MHNESKDKDGRLINLELSVDLNDETPQSFKTVAAKMGSAEQVQRSLEPTHCLKSIKIHKTKKNRTKSDSASNSSSSAECIDSDNSSTPIAVTKSATSKNQKRKALKSSPPLPNVTVKSGEQNGKSVLSSGNKKDTVVPGSSIPAAQEPIAPKIRKSRKISKKEKQEESFASLRDRDVTAAIIASPSADVDLNNETPKSRKTVAAKMDSAEQVQRSLEPTHCLKSIKIHETKKNRTKSDSVLNSSSSGCSDSDNLSPPLAVTKSATSKNQKRKRKALKSSLPLPSVAVKSGEKKENSVSKNENEMDTAVPGSSVLPPQNRIATKKRKGRIIVKEKKQECFTRYMSLNSILREDDVVNAATSANNDKDKNFMKTLIEEDVKLTSRMKILTAIFTNFIMNKPDCKLAKEYAIYGFNHYKIMNCFKKRSANSYTTCKNDDPELYELFEEFKREMIDEEDEIDPDQFKKFQDINEKENKTWSSKEEEIKAYNEFRIEKLMSIDCKYKTNTLKQAAKEMDANLRDHLYTQTPKMLKKYLNFKEFGVAVKEEIIKENSDFKKKNAEKDVAGHVKTPLKKIENRLRERSKQVGEERLKIIDTYEAFTTKICSSCNEEHIVSKSPKRYAFCKKCHVIWNRDINAGINILNIALINENILERGDIPNAKVFTGIQKMKRKGHVIQKQPQ

SEQ ID NO: 4164 - protein, 678 aa, Metopolophium dirhodum
MGSFDAISFRVFVCYASAVLREATNDDLYRQRRPSATSSYKICRVKNVVETITSGRHRQRVEKEYFRKKDGSLSRAAMRTFPHLPYKKMSESFVIKRDVAEVSALAVEASLYVHFHYTKLLHRSTQFSRDFTSNHLLDFYYHLQGKRQRKERVIRDEEYFGFRQKHGLFETVYDDHSTARSLEIVGNAVSEINVVVKTAIDLNKQRATNGQSDADERNSLDATKNDYSTIKLLWYRKIRKRKAENSLVGLLLDLNADKLWCGKILVCFGDGSLQDNMSYGKNLKLAVCSLRRAFHRRRDRCDVIDVDEYMTTRCCSRCAEPMPLPPRHTRDKDGRRRHNHRFRYCQKCGIHWNRDRCKEKLNTLAISVMNLWPNVRLRVIDGWVDRAGSSLHNEGRAVDITTSDRDKSKYGMLARLAVEAGFDWVNYNRRYIHCSCKSETKINTRTMGCFPGDSVVTTGAGVKKRMKDLRVGESVLALSNDGLLRPSEVLLFLDRNVTARTEYVTLVTDTGKSITATPTHLVLRWEKPERSQIRYANPVYAKSVRVNDTLLTVVNGDRGQLRLRAERVVAVSRTEKIGLYAPLTVDGTVVVDDVVASCYAVIDSQWLAHLAFLPVRALAAVRTSLYSLVWRLGHPLHDAPSLSPAIDAVQPADGIHWYPRMLYAISDYAIPASWMDTH

SEQ ID NO: 4165 - protein, 481 aa, Dreissena polymorpha
MKRKREHFTLWDAANVHKHKSMWYWWAYIRRKDMVNHEKTDCDVIQLLQSASVKKQKTQSDKFLTSFLVGLRPTKHQKQVLNEMLRVSNYTYNWCLWLVNEKGLKPHLFELQKVVCKTNASDVDPYYRMENDNWFFNNKMSTIKLTSCKNFCTSYKSAKSLKSKLKRPMSVSNIIQGSFCVQKLFIRRLSDKDVSIDNTQMQNRYICMMPDNFEKRSNPKERFLKLAKPITKIPPIDHDVKIVKRADGMFIMNIPCDPKYTRRNASNDTIEKRVCGIDPGGRTFATVYDPIDCCVFQVGIKEDKQYAISKLHNKIDHAHMHLTKAQNKKQQQAARERIVSLKKTHLKLKTFVDDIHLKLSSHLVKEYQYVALGKINVAQLVKTDRPKPLSPRAKRDLLYWQHYRFRQRLTHRTTNTECILDVQNEAYTSKTCGVCGTINKNLEKSETFYCDNCKYNTYRAVNGARNILLKSLRMFPFVNSQ

SEQ ID NO: 4166 - protein, 481 aa, Dreissena polymorpha
MKRKREHFTLWDAANVHKHKSMWYWWAYIRRKDMVNHEKTDCDVIQLLQSASVKKQKTQSDKFLTSFSVGLRPTKHQKQVLNEMLRVSNYTYNWCLWLVNEKGLKPHLFELQKVVCKTNASDVDPYYRMENDNWFFNNKMSTIKLTSCKNFCTSYKSAKSLKSKLKRPMSVSNIVQGSFCVQKLFIRRLSDKDVSIDNTQMLNRYVCMMPDNFEKRSKPKERFLKLAKRITNIPPINHDVNIVKRADGMFIMNIPCDPKYTRRNASNDTIDKRVCGIDPGGRTFATVYDPIDCIVFQVGIKEDKQYVISKLHNKIDHAHMHLTKAQNKKQQQAARERIVSLKKTHLKLKTFVDDIHLKLSSHLVKEYQYVALGKINVAQLVKTDRPKPLSPRAKRDLLYWQHYRFRQRLTHRTTNTECILDVQNEAYTSKTCGVCGTINKNLEKSETFYCDNCKYNTHRDVNGARNILLKSLRMFPFVNSQ

SEQ ID NO: 4167 - protein, 557 aa, Mythimna separata
MSSSCKTCGGVDHTRKSSKKCKEYLPPIRKRHLSDSSADLEIYTIKCGLVSVLCPLLDHEKRLKLLSEIRRDVRDLSRVYIELGVWINYYMKTAPRLPSSPDVLKFLYAMKGKGPYADAYRVMFEDRKFDDRLRSFVVQEMAKQYETVLHTNISTHAYSRLARYFRVKRNDPTLYAAFFKKELPVTNEEMRRVCTIINVDTLKGQKWWSTVPEWIKIQSKLEDFRLFPQPSHGLKHLIYTSRGWHELLRRVDPKSITPYWTRIVDHRRELWSPWLNVDMKKYGGSLQTDGVSVGLSMNRIQKKHDREPAKRTKKTYDRIIAVDPGSRIPIAAVESKRLEFRRITKKYVRSHTLEWKRERVRTRLCCASEAAERKAREKLDFPVSSKNSSHVFEYTVFRMTWFNVRQEPYEKHAKLTRLGLDKYIRTAKCQEKIVKEVFDGGGVESTLVLYGAGSNFMNGASFSGRKFKHDALLKRLRTKRNIDVEVVDEKYTSQACSSCNEKTGEFRKIVMNHRLRWGVCRNCNSEFDRDANAAKNILINHTRSAICRPGCSTSEAS

SEQ ID NO: 4168 - protein, 433 aa, Mythimna separata
MFGDRKFDDRLRSFVVQEMAKQYETVLHTNISTHAYSRLARYFRVKRNDPTLYTAFFKKELPVTNEEMRRVCTIINVDTLKGQKWWSTFPEWIKIQSKLEEFRLFPQPSHGLKHLTYTSRGWHELLRRVESITPYWTRIVDHRRELWSPWLNVDMKKYGGSLQTDGVSVSLSMNRIQKKHDREPAKRTKKTYDRIIAVDPGSRIPIAAVESKRLEFRRITKKYVRSHTLEWKRERVRTRLCCASEAAERKTREKLDFPVSSKNSSHVFEYTVFRMTWFNVRQEPYEKHAKLTRLGLDKYIRTAKCQEKIVKEVFDGGGVESTLVLYGAGSNFMNGASFSGRKFKHDALLKRLKTKRNIDVEVVDEKYTSQACSSCNEKTGEFRKIVMNHRLRWGVCRNCNSEFDRDANAAKNILINHTRSAICMPGCSTSEAS

SEQ ID NO: 4169 - protein, 1679 aa, Drosophila nannoptera
MARTPIQGFDGHLLRMTREQASLSRPDLAREIGVTDQSLKMWEIGGVSPSPKVYVRLTDYFGKDRWFFAPVPVSERTLLDYRQRAGISSPELSRCLGVPVARIRTIEDGERPTLTADQIARWAHEIGISVAGWYQVHLQRESSDPRAHCASARDAFLGVSVTTAVTGSVNTAGHRPTSTLSGRPQSCTTKTRVHRTRRVCTPRLGGELVGVALRLLDPTPSTTSDGSDAEDRDLTPRTTDEWDEVNEVAKSLAGITNCSRMALHARHRRGEIAAWNRVIELPPDYAAAVDQLEATAPAMIAELTESRAELDPAITALNAHQTSPTSWSLPVPDDADRGVWAGRDHWLACAEDACDAARERDLRPLQASPHTTRALLRARADFFDVNGRGCTASAETIVTRAIERHGATIAVSTGLTRLRAINRVLTDAGLLTVHNYGRHLRRIERMAATTWHGHTQTRAGSVVDATLPPELRPTPSPTGSADGRPAWATGLADRLAARDARHGVRHTTPTDPVDNPQHPATDEHAVNCGNPESSTYSVAYGLLSPSGSRRGAHASAQARADTERLHQTRPKNGEKTAKSARRGRGAQSTVISLRARRIADDLTRHDTTNPLASGPYAHLCGARPSADGDKTPQMTVTALARLIDRLTPSWAGTRDVLAGLVHAATSPTTGYVALGLHTRPTNPIAWMTTVLSRIDWTHPDDFPAWWKVTEAHGLHCITPTSTGSGDQQEQEGAEHAMTTTPTPATASHGTPSPDTPVRLRGYRYRLSPNDRQQAALAQLAGASRVAYNTLVGHNLDAQRRRRALHDRLTADGVDDKVAWQQVKTAAKTDDTLQLTTSYQKAATTIIGPEITRHRDAAHRIAAGEAPDTVWPDTERYATPWLHTVPRRVLVSGLQDAAKAFRNYFDSLTGKRAGRPVGFPRFKRKGKARDSWTIPRPEAMGPKDAERGIYHRSVDGHAGPITDYHHIRLASLGVIRVESSTKRLSRALRRGAELRSFTISEAAGYWYVSLLAAEPDNRRVEPTRRQKDGGAVGIDLGVSKLMSFDNGTVIDNPRLLAQDDRRIARTQRKIDRAVPGSVGHDRLKRRLARHQHRLAARRKGLIHETTAALVDSTTLIAIEDLNVAGMTASARGTIDNPGKNVAAKAGLNRSILDASFGEIRRQLTYKAPEHGVDLVPVDRFFPSSQTCSQCGSKTKISLATRTYRCGTCGMILDRDVNAARNIINFALTTRANITTRRFTVIITVANTKGGVGKTTTTIYLAEAFARQGLNARVIDMDPQGSATRWYDYAVEAGEPAWTVENLTEYRLKQISDSERPTIIDCPPGDPRIFTVAVNLADIVVIPCKPSPDDYDRTQITYDTVPDGKAVVLVNDARLRTRALDQLVGDLDNPSDTTREPFQRFDTIVTHREHVVHANGTVPDRLNGFDDRNAHRDESPAPTSELLPKAKDDRVILGFRISEDKRRAFRTKATQEDTTVQAVLTEAVDRFLADDTVQPNKRAETTISIEGLPRPQQIVIIWSHNRTPDALAELTAGTRVIFAAKEDTLTQRTDDDETTGAVVTVLVAVGLFYDIITDDRDATDIYTSIEPRPLTFSGTVATVETVGKNRGITLVMPRHGQAQPIETRWPADIADSVVDIRPGDEITVEAGERSLSWRVSIDDLGRRAVVPVVTATALATSTILS

SEQ ID NO: 4170 - protein, 971 aa, Sitodiplosis mosellana
MSRDTAAINLPWIEKYRPSSLNELISHDEIIATISKFIEQNQLPHLLFYGPPGTGKTTSILACARKLYAEKDFQSMVLELNASDDRGIGIVRGKILDFASTRTIFSKGFKLIILDEADAMTNDAQNALRRVIEKYTDNVRFCIICNYLSKIIPALQSRCTRFRFAPLSEDQIIPRLDYVIDQERLKVSDDGKKALIKLANGDMRKVLNVLQSTWMAHKNITEETVYLCVGHPTPSDIKTIINWLMSVESFQECCETKMPKRKGTPLRGNQRKKKKIVSKTGIEGEIGILAIKMTLKAIVRPQYYQQVKDWFTQKSIECTKICALASLLFLYKVKSANESNNADFFSGDGNKEIKDCFYAVLQKNKEKEEMVPDFRDFVENMEAENRFSWPGNSFFGNQMQYLYKQYTTNLRNNLEMHAERRLYQYLIMRAWQFNAVSTGLTLRNDDIKRAVQWTIDRYDPIKTTDRHWEVKWEKRQLLLDMIAEIGGPEDNDVAIYTTSEGTWFKSINMWLTMQMEVDNFHIWAEENGIEIPKIKNLKVIPIHQFMRQHVKMETDVLIRMMSEMRFRLHGLIIRYEIVEDPMTQCWDEIFDMPKIHRLLKSNKRFRPYIASNGQAVSIMYEVPKSHLDRLVDDEIVRKRYRDGVYVYEIGIDPGMRTWNATVRRNIKTGKEINFTVSSKRYHYLARQGVRDRKAKRWTRRFVAEEQHDRERYQRMPSPKGENWGSYIAHRLTMLKKGIETYTTEKYARLQFDKYIQSNRATDKIANLLTNRKPSIIHMGAVDMPANSPIRIKKHVRCPGNRKLAKSFRKIPNTVVRQVNENRTSQLCGRCFTPFDIATQRDRMKVCEWCLPDNDDWPPNLQLPTKIVSKKSKRTLIADRQRMREAVEQDPNQAERFVSKVISYQKNWQQSAAIDEDADPAEQEDAAESHDRRILKTCWHRDITAAKLILYKGHCHLFGIQLHFMFTIERIR

SEQ ID NO: 4171 - protein, 626 aa, Sitodiplosis mosellana
MCFQGVLRQNYTNDRMFMVPGFRQIVIKILGEWFPWPTNRFFGNTFKYLYEQYATNVKTNLKTHCEQRLRKFFKMRCYELNHMFLSGKIQLDELFDGDDIKNAINYTYNRRDSTRGNANAIRKLEILLAELYWIGAPHRPDDPHPFNIREFVELNWFQALRMFINIQRDIHNFHLSFANLRQSWNLFRKYPLYVQQPEFPEPPEITTFTVIPKCTFQRRHVKIDTDSLYNILKGIKAMPRTKGTRVLRDGEYQERWISQIEFKERGGWSLFFNMDEIIKLVKNKKEFGDSIISDGVSASVLFKLPKQSKTVADEDEAETKRKYFANEFAYALGIDPGMRTFIASVRLDLKTGEETNEKISFKQYHQKSKQDARNIKAEQMTRVFTYDEQADLKRIAAEIGQTPSPRNISWRHYIEHRLRMSQDGIAAYSQKNYARLRLISSPYVRCPGVRKLIAAFKRRGNCVVRLVDEYMTSQHCARCFKRFPIWTKSKRYKKCNDCQPDERVGLPRTIYTNMSKRVLQMQRKIMRTWEEMRDQGDAIAAILTQRNSGRLVSKKQRFFKTWQPNAAENAGTEDAAQSRKLLKSLWHRDISAAKLIMYKGLCTLLDIPIHPALLRRPDDDGVPLNP

SEQ ID NO: 4172 - protein, 397 aa, Sitodiplosis mosellana
MKHIKIFICSIQWHANWVPSSWQKDCLASRLTSPEMYENGVFRFVLGMDPGVRTWNATVRKHIASGVIENITIDGPKYHFRAKYGKRKRKSEKWLRLFTELEQHDRNQYPFYPSPKGASNWMSYIEHRVKMLQPGMEVYTARKYIRLNLDKHIEETRASDTIAAFLTRKLPSLIFLGAAQMAPNSPIGIKKRLRCPGVRKLLNSFKKLHNCVVVMVDEYKTSQTCAKCFRPFDRRTKKDRYKVCRQCIPHAANITTDKHLSSVIISKKSNRSYQRERRHVVAEYERLNVHPVYSHGLVPKLNVWFKNWQLNTDNTWNDSRHPHQQNTVWHRDEVAAKCILYKGLCMIKGLDVHPQLSRQHHAAAAAAQNNAEGDQDDNDSDSDDDYVYVLDDVSDEE

SEQ ID NO: 4173 - protein, 844 aa, Sitodiplosis mosellana
MRLKEAINLAEDRAENFLQTINQVVDEMSHLVKLAYLNVHCKLMRILTSGNVQTIENEFWRRGGCNRDYFNKCFNGVREGGVDPSKQNPRTPFHFELDKTVEECIQDFKIKAPPTIGFQSIFNDAFKLYRTMFMNCICVHGYKWIQKLLWHFIYIDVIYNDGNVFKLPADVQKPTTIKQMKYNKMYRQWVQLAMRHLKPPKDEVVQVAPPLNENKARKLIEQLNDKLQPINFNIKNHGYNYFKDLHTSSMSGGPWYKYVPFFYTLQQYNRTQNEDRARRLTEHIAAHENEMETETEIDNNQRRSPHSRRRRRRIPHLLLTPRLKVFQVFPESHFGRKSISASHTGFHKLLRLQNYPDEQDIANAKARAGEDPIVKKRFRELWRKYFKVDEIEGKHDAVFGNHIYTNGESISFLMHRRNNNKEQQQQNVNNEARTKRKAVDDDDDDDDDDDDDDDDDDNDDNDDAAAAAAAAKKQKENRRKKLQECNREVVLDVGKRLMICGVIIDHTTGDYRHLKFSSHEYDRMCKKQVFKKQREAITNQIDDEMKQDREAIAKTSASNLQPSSRSPDFAAYARHTLKYFTRAMAAYGSKEYAKIDYDAWAQTRRTLVYIARMIVGRSKDVVVIVGDKLPGANSLGFGYSGTQVHGLFKLLDEHPHCTVYYGSEHRTSKCCCRCGQVLLDARMGESRSLAEKEDRRPRDHGKRTEKSRTKVCLICKPMDLKGMLPMMRSPLPEKTIYVLKNKRELQIEREAANQGQSHPKNQKYAHLEKITWKSKHTISKTTGKRVRRRKTKWRMRQIDNDDIDVCFSIWKRHQFNGAYALDAVASRSLNRDINASINIRTLCK

SEQ ID NO: 4174 - protein, 506 aa, Sitodiplosis mosellana
MKRYDGTRGDADRLAKRDRLLLYVRDIRGPADDDIAKFTKDEDTWFASLPMWLIMQSEIETHLNWVEQHHDNIVQVIALPNIKNLVVIPICHHTRKAVRIDADVLYRMMCGTGTIPRDEYGLQHSGSDVTSKSNQAYYFNMIFNMEKINRVLKANKKFEHILSDGVSASILYTVKKTVVDKLVEDGLVRKRYSDGFYVYELGIDWGMKTWNATVRRRMAKSGFIMAKSKKYHYCTGDGVRKKKRERWTRAFGQFEESDRNNRARYDRMPSPKGSNWRDYIRHRFTIMKKAIAVYTTEKYTRLSFDHYIESNRVSDKVAAMLTNRKRCIINIGASQPPANSPIQIKKHVRCPGVRKLVKSFKKMEGNVIRFVNEARSSRLCARCFEPFPLSTLNDRVKVCEWCMPDQDDWPDGMKLPEKIVAAKSKRKLRSERRAMRQAAVQNPNQPRGFVSKVICYRKNWQQNAANGMDDNVEERRGVIIHDAELGIIEYTDEFVPEDQEMTTLQY

SEQ ID NO: 4175 - protein, 965 aa, Sitodiplosis mosellana
MTVANPEWKNNVKEHIPNDQGKMPKLTQSMLKETLDKMWSEMEKYVSTDDELVRSLNFPSINYDVMNELRWWTKGSSAFLGDKIINAYLKLICERSSKGDGLPKVYAMDTYFLPELHRDGKYNYDHVRESTSDTDIFTCDIILVPVHISGGTDGGHWCMAIIDMEYRTIKYYNSMGAPNDAVLTNLLQYLKDEYRDKKKEEFDMSGWQKENVLGLNIPQQDNGYDCGVFSCISNLVSMKRKRAQNGRPRSVKLSLNSVLRDQYRANFVAQVNNWCHTATVITVLASLLFLFENNRAFDEDNHGFFSGNGYELIKDCFKNILNENRHKLPLAFRQIIEAAVPNFRWPQREGMGNAFNQLIDQYTTNVKNNIKTWCYTRIKTFFVLQRYELNLLGHNISDIDVKNATKSVMFNNIVPSANVERLLEQARMIGIPVGTKLCDLVRGSWFQTIPIFITIQRLVFNHHERYELLNDLWRRYYRDRLHNAIPSIARPPKIKNFRVIPIHDFKMKHIRIDIHLFYQMACKLGAIKLAKGLFGQPVNISKKVYDSNPFVSWDTIFNMDKIQKVGNRKTFDYTIVTDSVAVSLCFLKPECLSHEYSHEQINEMYENGVFRFVLGMDPGVRTWNATVRKHIASGVEENITIDGPKYHFRAKYGKRKRKSEKWLRLFTELEQHDRNQYPFYPSPKGASNWMSYIEHRVKMLQPGMEVYTARKYIRLNLDKHIEETRASDTIAAFLTRKLPSLIFLGAAQMAPNSPIGIKKRLRCPGVRKLLNSFKKLHNCVVVMVDEFKTSQTCAKCFRPFDRRTKKDRYKVCRQCIPHAANITTDKHLSSVIISKKSNRSYQRERRHVVAEYERLNVHPVYSHGLVPKLNVWFKNWQLNTDNTWNDSRHPHQQNTVWHRDEVAAKCILYKGLCMIKGLDVHPQLSRQHHAAAAAAHNNAEGDQDDNDSDSDDDYVYVLDDVSDEE

SEQ ID NO: 4176 - protein, 871 aa, Sitodiplosis mosellana
MGKSKFWGKLVDGALVGITGYEVGKERGEAKYEGTQPIQPVTQPRTEVHATGANDLVIVLIGIILVLIVLIIAKYLVSKYIKRTINQNHFNQFNGLPLHPIEKHIRTMANRFKPSIPAEGETKDEITTIKCALKTIIRPQYQQALMSKITDLSVENNDFALFGGSGEDKIKLCFEQVLWHNNQPPKPKSTYKPRGEKPRGPRAELPRIDPEFKAIVEGLDDYHRIDWPNNKDFCNGLKHLTNQYTDNVVTNLKTHANKHITQYLKLKVFQWNSDVGDDAEKFLPSDIASVVNLIVKQKDIKVPIRDPNKLERCSVLYDMVNDLNVFPEIDLHDLTTDPKHWFKAMPMYLSMQREIEEYNSEWPHQRRPKRKKRKRKKTKGKWKRKRSQMLDNPDFRPLIRNLVVVPMCDFRRTHFKIDCSSMHQVLSSQKLLPKVEIENKKGTTSTKTIQQKDFNHSRDYWWNQYFYMRKIRRFVRAKKQFDYSINTDGISVSLQYSAKKKTDNKEIDQKSRIIQKIEDGTIKNYSGVDTGVRSWNTTTTHDIETGKETNFVMSSKQFHWQTGQKVRNAKAKRWTKNFVEMERADRENRDLYPVMPSPKGSTWLNYIKHRVKMMKHGICAYSTAKYTRLALDKHIKSSSVVDEWVNKVTDKKPTLFFFGADGEIPPDSPISIKKHVRCPGVRKTLRSIKKRRDCFIQLVDEWGTSQTDARCMNRFQNQNKAARFKKCRCVPDARTLLPTKIVSKLGKTDLSIYRQLQRAMNEEALVGDERLFPKVKCYYKNWRLNLECSVIWHRDVVAAKNILLKGLWTLLGLPIPEAINRYWREAAEAAAAVAAAAAARATAEAAAAAVAIVDNDVEMFENDQQPADHAV

SEQ ID NO: 4177 - protein, 1515 aa, Sitodiplosis mosellana
MTLVYVLIITIFAVIQPAVGDAEWMNDCGVCHCKWISSKKQADCKNTSLISVPREMSVELQVIDLSFNIIPELRGNEFKDANLPNLHKIYMKNCTLQEIHRDAFKGLHLLIELDLSNNFLKVLYPGTFTDVIRLRVLIVTHNQLEYLDDNLFENLGFLAKVDFRYNELKSISQHTFVNVSAIREIDLENNQLTVLKEESFRGMDNLRSLTLNQNPWNCTCDLQAFQKFAITRGLYTPPTDCHLPMNLRGKLWTDVPAENFACRPVILYPHDGFTIDANTENITISCRLKGSPKPHIDWLYNNRPMNLEDQRISIRDTQDENRRDSIDYYVSELHIVGVKTEDRGTYTCLAKNTGGVSKVDTHVAVTSVLESVDGMGMGIIGSTAGVPTNNSPNLLFIVCLVAIVLLTLLIIVVLILCCYCRRVKTYSKNGSISENGLVASKIDRSTDGSMLEGSVIMEMQKSLLTEVNPVEKPPRRSETDGKSIPSDDVQEIKKTLLDEQSYGHHEDETHSIALSDTTPRSRATFVDDGYGTNLPPDLLSFPSRYPPSSSTQSSITNIPEGNLYIKSPIASPIYQHNAYAAQQAGYRTLQHPKNRNLAIINPRTSSPFQPAPILYAPIMMKQQGYVTIPRKPRTPSWAPSITSTLVDFPPTSPTSTISTELAIDPIYDNLGLRTSASGHSALSVKKQQQLLLQQQHNQPMAVSVSGSLDHIGAGPSYTMKDRPLPATPRIYEPIQEQQQIFPNGGELCGMNDETELLFNKSIEPHPIIMGYQRKKAKKKGKPIAVLGDVIEEDEKEKDSGIRTVKTQLRAILRPEYRDLLIAAITDRSMMATKICALASQLFLFRCERAFEDNDKGFFEQNGEKVIRSCFFGVLKKNIYKKKKMPPEFRKMVQQLDDSHRVVWPNADYFGNGMNDLIDTYVTNVKNNLKTHSKKRLREWLRVKVFESSLVARYEQADIDRVISLAIFGNDDITINGMDDVAKRERRTLLIGMVTKNSWWDIPDNNIGRFTNGKDWFKSIAFWISLQRKIDDFNTCEEYREERRCQREEFEELKRCRRRNHRPCTCQQPVDRGQNGNEYIEKGPPRVKNLAVIPICSFTRTHFTLDIRTLYFLLRQLGIVPLNITEDEFRKQKEYYWDQYFDMRKIYHLGRSRKKFRFRILSNGQAVSLQFDIDKTKLKPVDKKAIVQNYKKFVNEGATDPGVNTWNATTVHNIATGKEANYTISSKQYHYWTKQTVRNRQGKRWTKGFVKEERQDRENRALYPVMPSPLGRHWEDYIRHRLKMTERGIAVYTTDKYTRLNFDKYVRANSVTDSIAGMLTNHQPTLMHFGAAQMSPSSPIGIKKSLRCPGNRKMIRSYKKCRGCVVNMVDEYYTSQTCAKCFGRFDRRTKRHRFKVCHDCRPQSVVRAMLPSMIVCKVNKRKMRHEKLKLFLLEKEAEEGNGNPAVGNDVPHPDQLNPELLPKVAIYHKTWHVNESSGILEYVKFNSAGEMEVVEPRLHKTTWHRDIAAAKCILIK

SEQ ID NO: 4178 - protein, 2212 aa, Sitodiplosis mosellana
MYEYIQKDWFESLWIWMGMQRIVEKFLIDTAHLREQWKAYDRDPVNNREPSVPKIPKVKNFAAIPLSDTKLKHIPFDHIDLIDIIGQLRNERGWDIRADYRTYYKQGENKDEAWGIVFDIDKIRRLRTGSKEFYHKIQTNSSAVSVLFSRPKRKDPGVTLSEIKAKYEKPVSKGGYKYESGIDPGQKTKMACVRRTLATGIETNIKLSSIQYHWGARQGMRDKQAKKMTSKYVHKEQRDLKSYPITSVSPRGSQWKSFIKHKIKMLIDSLATYARRKYAQLSLHKYIESNREMDLMAKHITNNETGVVFLGDAAFPSNSKIGVKRTKRSPDQRKFIVSLKKNGKTDVVLTPEPYTSQTCANCLRRFPRSTKSDRFKVCKDCRPHKDVRLPPVIVTDRSRRRKQRDRKQNASQKPTANVTRGERAEKHREERRSERESHNPEQLDTEEAVRRYNRRIRRRELRQRRRVAGHRSRKVTKQPEAESDLPGFSSGNTPSADLIDMTQMDANNAAHLSSKQQHNNANAQIQQQRAALSAAEKHLKMGPNSSQQITAAIIQQQNRAIAQQNLEKFNSMTPVEKQRLFKKFDKKQFDAPMLHSENNLNRSLERSIQPPQLPSRSPQIPMNTNAPLDLQQQSKPQISHKQSQQLNGAWNSYSAQQQSLPNLSNRTDIGQTTITLSNLNAHQSSHTQPAMPPQIPAAHNQSQVQSMQTQQNYQQQHQQQQQQQSQQQPSIGQENIVRVFDELMKNIARMKMFVRPSMCKPYGKQSESLQKNTESVGDLNDAASVASSGSMKSCKVLLRRENFDDMNTNTTAEDRLVAHSTRSRRSSQLTEENVSAVYSSAPRRSLRAGSVISDDTESTQISRPRSARLAQSQNTPKKDSAPRPSTSARRSSRLLSENEKAAESPAKITPARRNTRSSVASEDQLSPTRRTSSRLTESQGTPKSLKTKASKIKVEPTTPRRASMRVNKSIIATDIIDEEPTDEEFDETVIEKPSKSKQPVKLRESLIIEVDDEDESNGEKKEIESNATKDGHKRKVQADDEPIVINEPELVDVNTIPAEERKSATKEKVTSSSDLVKSPRVDASIKSPILKTASMPMSPVVLITTTTSHSPKLKTSLPEAQTPTFEPVEPMEMSMTEAIEPTGTPKGKPQKIVEISETPQINSPKIKAVASDLDSMDVTAMVNESILSPAPIRSKESRRKSNVSVADTTQTGSDTIESDKLDDSQSNQASSANVPSIEPEAKDDVEEMEVDTEPAPEADKESSTPKSKASTSNANESFDVSPLVQEDEKLTPTPQSTKKSSKRQSLNDTVQSTGFDQMEVTILAEESTKKTKKIKSGTPKDSPKPTAKDTPEKAKTPKSSAKTPQKEKSIDQEDEEMFDDTSEMSKTKTPVMFRPPRESTFGGMSVSLSEAINNLVAEIVSELTPTTSKADEPQAIDEVQEVTTEKNDTTIGKVKEESVIVEPDVSVVDETQAELDSSTPMNEAPPQKSTAPSSKNERKSVQIMTPVGDKNQKMLMKRIDTPYPGEKSITEETAANRSKSDERNKKREARAEARENLQILRDSWSKSIKRNSLSNEPSKPIDALGTADTSSKIDEQPAKKAVPARNNWKGLVDSESEPEEDELIPESDEGSDNEGEEEEESGNEFVDDVVEVIEDYESGDSMDEEERREREENEIDEGQYIGSDDTEDEDEDDDYEDDGFIVDEGEETDASLSEEEEEIVVVQKPKRRASRIIEPSSSEESDGESIADSNDIVAVSVELVPESVVVVHRNTSDAEELVEGKTFPTTYLMPMEEDEVKSTKTTKPVRSSAEEAEANRTLDEERQIEETRQENKVSAQAVEPATSSNANESVREKRDDIMFDSDETASDKAIEQKETHIEKIETTLQPTALSDGKENQTAARKPKKIVVKHRASLPGIDRLPKSSIVKKNSRASLGDLNPIAQNVTITQLKTQPSKAKASEKSHSQTKNHVSMSNNGIAVEQDETPTANVSLRAKDSKNAALDISAEENNNNEKASKKGITIELLVAVVSEASEKKSKFKRKFIEIDIDEEVQVRPKSKKLLRIINTASGQFIEEPMTPEKKNKFGFREAPRTPVNHDFKVQKRVQFAQPGRSNKRKSMYLNEDEEVDLLLPRPKWKINMQFEAEQPKKRPRKLDLGSTEVILKPLEPKKRKKQTYLVPVELRRYRHNILNRAGIPRQDTRALLRERQKRMAYK

SEQ ID NO: 4179 - protein, 985 aa, Sitodiplosis mosellana
MEQIVITDCFQLCHIGQHQRSTHSPNARRHSRYGDTSEQSRAVGTEIPKVKNFAAIPLCDTKLKHIPFDHKDLIDIVGQLRNERGWDIRADYRTYYKQGENKDEAWGIVFDIDKIDAQNRPKRKGAGVTLEQIKAKYEKPVSKGGYKYESGIDPGQKTKMACVRRTLATGIETNIKLSSIQYHWGARQGMRDKQAKKMTRKYVHKEQRDLKSYPITSVSPRGSQWKSFIKHKIKMLTDSLATYARRKYAQLSLHKYIESNREMDLMAKHITNNETGVVFLGDAAFPSNSKIGVKRTKRSPDQRKFIVSLKKNGKTDVVLTPEPYTSQTCANCLRRFPRSTKSDRFKVCKDCRPHKDVRLPPVIVTDRSRRRKQRDRKQNASQKPTANVTRAERAEKHREKRRSERESHNPEQLDTEEAVRRYNRRIRRRELRQRRRVAGHRSRKVTKQPEAESDLPGFLDGCTEDTSNSYALECFKSFIGTTLRMECDEAIAKNLSKVKLFEPNTSVNINELVKQMMPGKCFTIDDQSKIPTPIGDNKELTVIDHTKLKEGYNLITFVEQSMNLKYYRQRNQTQNIAKIIETFPPYLPCEDELCFVKFNDFWYRGSFDKKASDTTAIVLVLDIEKGVEVELKNIRKITHDFAHEPHLLFSAALHGYGSKISKEQADGLMKKFKINDDVHVKKETPIENAILCTSSDVPSASGYESPTPSKRNLDKPPPLHRNRRFKKRIKEYHTASSSSDDECETQHKSYNLRRTRCEGSPSQSKNVIKPESKTVQPQEYSGRMLRKRIVEEAKTSPTQDDRSSSPMKRSKKMLDSINDTCGGASSSSMGCTSAGDFSKPYSELKYLESIGSIRTIRRAKHPGINKVPSAKAITATPFVSPESQNGWDRKTKLKISYRTGLVKTDVQYALIIYEPLTMITRRNLLDEFEKAAEEEQHQNKSSSKAPFSSPLGPMQNPRESINLKTPTIRTKPKNDKVSSLRRLRF

SEQ ID NO: 4180 - protein, 670 aa, Sitodiplosis mosellana
MAQQSATKTEVKAIVEGLDDYHRIDWPNNKDFCNGLKHLTNQYTDNVVTNLETHANKHITQYLKLKVFQWNSDVGDDAEKFLPSDIASVVNLIVKQKDIKVPIRDPNKLERCSVLYDMVNDLNVFPEIDLHDLTTDPKHWFKAMPMYLSMQREIEEYNSEWPHQRRPKRKKRKRKKTKGKWKRKRSQMLDNPDFRPLIRNLVVVPMCDFRRTHFKIDCSSMHQVLSSQKLLPKVEIENKKGTTSTKTIQQKDFNHSRDYWWNQYFYMRKIRRFVRAKKQFDYSINTDGISVSLQYSAKKKTDNKEIDQKSRIIQKIEDGTIKNYSGVDTGVRSWNTTTTHDIETGKETNFVMSSKQFHWQTGQKVRNAKAKRWTKNFVEMERADRENRDLYPVMPSPKGSTWLNYIKHRVKMMKHGICAYSTAKYTRLALDKHIKSSSVVDEWVNKVTDKKPTLFFFGADGEIPPDSPISIKKHVRCPGVRKTLRSIKKRRDCFIQLVDEWGTSQTDARCMNRFQNQNKAARFKKCRCVPDARTLLPTKIVSKLGKTDLSIYRQLQRAMNEEALVGDERLFPKVKCYYKNWRLNLECSVIWHRDVVAAKNILLKGLWTLLGLPIPEAINRYWREAAEAAAAVAAAAAARATAEAAAAAVAIVDNDVEMFENDQQPADHAV

SEQ ID NO: 4181 - protein, 452 aa, Sitodiplosis mosellana
MHQLDDNHRVDWSNADCFGNGMNDIIDPYVKNVKNKLKTHSKKRLREWLRVKVFESSLVARYEEADIDRVILAIYGNDDIEINGMDDVAKRGRRTLLMKMVTDNNRGQHEYIEKGPPKVKNLTVIPIRSFTRTHFTLDNRTLYRLLRQLEIVPLNITEDEFRKQKEYYWGQYFDMRKIYRLGRSRKKFRFRILSNGQAVSLQFDIDKTKLKPVDKKAIVQNYSKFVNKGGTDPGMNTWNATTVHNIEPGKEANYTISSKQYHYWTKQKVRNRQRKRWTKDVAKEERRDRENRALYPVMPSPLGRHWEDYIRHRLKMTERGIAVYTTDKYTRLNFDKYVRSNCVTESKAGMLTNYQLSLMHFGAAQISPSSPIGIKKSLRCPDNRKMIRSYKKCPGCVVNMVDEYYTSQTCAKCFGRFDRRTKRHRFKGNSSVGNDVPHPDQLNPDLLPNIAI

SEQ ID NO: 4182 - protein, 225 aa, Sitodiplosis mosellana
MCGQKQSKTAVDEDKAETKRKYLANEFVYALGFDPGMRTFIATTNEKISFKQYHQKSEQDARIIKAERMTRVFEHDKQADLKRIAAEIGQTSSPRNISWRHYIEHRLRMSQDGFAAYSQENYVRIRLDKHIGWRRAIDLIAGKLVHFKAAIINIGAAEISPDWPIRIKKYVRCPGVRKLIAAFKRRGNCIVRLLDEYMTSQHCARCFKWFPIWTKSKRYKKCNDC

SEQ ID NO: 4183 - protein, 866 aa, Sitodiplosis mosellana
MDAMRKKKSLFAEEIYQSDKSNSRIYANDQLSPYFADLFQCARRAKNDGLIFSVSSLGGRIRVKKFEHSQPYTIENKTQLNDVIATVERTEKQINPPEMSPRSQETNDTAKKDESPQSIDSVSAREIRGKTFTHNRQLSHRNRPSQSRQPSSSAPNSTNNYNSIGPYREQYQKRNSRHPPKPKSTYKPRGEKPRGPRAELPRIDPEFKAIVEGLDDYHRIDWPNNKDFCNGLKHLTNQYTDNVVTNLKTHANKHITQYLKLKVFQWNSDVGDDAEKFLPSDIASVVNLIVKQKDIKVPIRDPNKLERCSVLYDMVNDLNVFPEIDLHDLTTDPKHWFKAMPMYLSMQREIEEYNSEWPHQRRPKRKKRKRKKTKGKWKRKRSQMLDNPDFRPLIRNLVVVPMCDFRRTHFKIDCSSMHQVLSSQKLLPKVEIENKKGTTSTKTIQQKDFNHSRDYWWNQYFYMRKIRRFVRAKKQFDYSINTDGISVSLQYSAKKKTDNKEIDQKSRIIQKIEDGTIKNYSGVDTGVRSWNTTTTHDIETGKETNFVMSSKQFHWQTGQKVRNAKAKRWTKNFVEMERADRENRELYPVMPSPKGSTWLNYIKHRVKMMKHGICAYSTAKYTRLALDKHIKSSSVVDEWVNKVTDKKPTLFFFGADGEIPPDSPISIKKHVRCPGVRKTLRSIKKRRDCFIQLVDEWGTSQTDARCMNRFQNQNKAARFKKCRCVPDARTLLPTKIVSKLGKTDLSIYRQLQRAMNEEALVGDERLFPKVKCYYKNWRLNLECSVIWHRDVVAAKNILLKGLWTLLGLPIPEAINRYWREAAEAAAAVAAAAAARATAEAAAAAVAIVDNDVEMFENDQQPADHAV

SEQ ID NO: 4184 - protein, 665 aa, Sitodiplosis mosellana
MYEYIQKDWFESLWMWIGMQRIVEKFLIDTAHLRQQWKAYDRDPVNNREPSVPKIPKVKNFAAIPLSDTKLKHIPFDHNDLIEIIGQLRKERGWNIRADYRTYYKQGENKDEAWGIVFDIDKIRRLRTGSKEFYHKIQTNSSAASVLFSRPKRKGAGVTLSEIKAKYEKPVSKGGYKYESGIDPGQKTKMACVRRTLATGTETNIKLSSIQYHWGARQGMRDKRATKMTRKYVHKEQRDLKSYPITSVSPRGSQWKSFIKHKIKMLTDSLATYARRKYAQLSLHKYIESNREMDLMAKHITNNETGVVFLGDAAFPSNSKIGVKRTKRTPDQRKFIIILVEGPIAAGKTEFAKKLANDLDMYYLPQACMDDVYINEYGYDLRDLDVKLPPGAQSFDEKKFVNDPTNRLTAAFQLNMYSLKFSDYIDALAHLFSTGEGVVLERSPYSDIVFVEALYKCNLITKTTYKGLIETRNNSLPEILKPHLVIYLDVPVNTTLEKIKKRNLHNEANSPLFKDTKFLETIDEVYKRNFLKDISSHSELLVYDWSNGGDTELVVEDIERIDFDSYEKESSKMRDWRFFRVEADWCEARMKYTEDRHITFSYANLPLFHCPDLCIQPEDNMVRNRIYEEAKGSKYAYGYDVELGDKDILFKTKHFNSPKSKHWDF

SEQ ID NO: 4185 - protein, 394 aa, Sitodiplosis mosellana
MPVHDFDLKHIRIDVTHFFKIARNLGALNHAIGKSGRKVYIEKETYNKNPAQWWKHVFNMKKINKIGDRKMKFDCSIVIDRVSVSLMYIKSNRTLDAKDLKTIEQMYRDELFVYQFGIDPGVRTLNATVRRTVAIANEKTSHCWSSNHWRAKRSKRRQKEERWQRTFKEQQQRDLRSYPVVPSPKSKNAWKSYICHRLTMMALEIAVFGTRKYARLSLNTTNTWRKNCRIVNEQKAINDLLGRSTNGTKLTDWNQKTIAMPRHKKIVGFKKLSNCIVRFVDEYFTSQTCAKCFGRFDPRTKRNRFKVWRQCWLNGYDSQIMPNKIVTTLSSRKLKKARKEEKDERMQQNVNNNQPRRCEVFEYRIHPNLSRPVQQNEQNIDSDYEHISEDEDDE

SEQ ID NO: 4186 - protein, 586 aa, Sitodiplosis mosellana
MTLYQVLKEEYRDRFMARIKDWCDAATRISYLASTLFLYQAESAVDSNDEIFFAGNGNEIIRQCFLSVVDGNHVRLPDEFLMMIQQHQPNLVWPERNGMSNAFNYLYEGYQTNVKNNVRMWYVTRMRAFLRMRCFEFDHGRLRYRKPANVGIFDETDVKNTTKFLVNQRDWTQGNADRYRKMQFLLSEVVRIGGPADNNLKEFVTKKWFASLHMWIKIQRNISYFHTTYGILNSDWAKYKSDRVTNKMPLVPRPPKVKNFIAIPVHDFDLKHIRIDVKHFYEIARGLGALKHAIGKSGRKVCIEKEVYNKNPAQWWKHVFNMKKINKIGGRKMKFDCSIMTDSVSVSLMYIKSNRTLDAKDLKTIEDMYREGRFVYELGIDPGVRTWNATVRRTVATGDEENITIAGPTYHWRAKRSKRRQKEERWQRTFKEQQQRDLRSYPVVPSPKSKDAWKSYICHRLTMMALGIAVFGTRKYARLSFDKYVESTRASDKIAASLTNKKPSMIYLGAAQMAPNSPIGIKRRLRCPGTRKLLASFKKLNNCTVRFVDEYFTSQTCAKCFGRFDPRTKRNRFKVCRQCWLNGYDG

SEQ ID NO: 4187 - protein, 755 aa, Sitodiplosis mosellana
MSRFEMMRAAQLENDGFKAFKATTKSGSQGSHLGPTLFLLFINDIVDEMDDVFISLFADDVEIAKIIHSSTDAAVLQRAIDMLKACRTMANRFKPSLPAEGETKDEITTIKCALKTIIRPQYQQALMSKITDLSVENNDFALFGGSGEDKIKLCFEQVLWHNNQPPKPKAKYKPTGEKPRGPQAELPRIDPEFKAIVEGLDDYHRIDWPNNKDFSNGLKHLTNQYTDNVVTNLETHANKHITQYLKLKEFELNSNLEEDGEKFLPSDIENVVKLIIKQKDIKVPSRDPNKLVRCEVLYDIVRDCNVFPEIDLHDLTTDPKHWYKAMPMYLSMQRVIEEYNSEWPHQRRPKPKDFNRDRDYWWNQYFYMRKIRRFVRGKKQFDFSINTDGISVSLQYSAKKKTVNKEIDQKSRIIQKIEDSTIKNYSGVDSGVRSWNTTTTHDIETGKETNFVMSSKQFHWQTGQKVRNAKAKRWTKNFVEMERADRENRELYPVMPSPKGSMWLNYIKHRVKMMKHGICAYSTAKYTRLALDKHIKSSSVVDEWVNKVTDKKPTLFFFGADGEIPPDSPISIKKHVRCRGVRKTLRSIKKRRDCFIQLVDEWGTSQTDARCMHRFENQRKDARFKRCRCIPDARTLLPTKIVSELGKTDLSIYRQLQRAMNEEASEEDECLFPKVKCYYKNWQLNLECSVIWHRDVVAAKNILLKGLWTLLGLPIPEAINRYWREAAEAAAAAVAIVDNDVEMFEYDQQPADHAV

SEQ ID NO: 4188 - protein, 633 aa, Sitodiplosis mosellana
MAQQSATKIEVKAIVEGLDDYHRIDWPNNKDFCNGLKHLTNQYTDNVVTNLETHANKHITQYLKLKVFQWNSDVGDDAEKFLPSDIASVVNLIIKQKDIKVPIRDPNKLERCSVLYDMVNDLNVFPDIDLHDLTTGKQHWFKAMPMYLSMQREIEEYNSEWPHQRRPKLVVPMCDFRRTHFKIDCSSMHQVLSSQKLLPKVEIENKKGTTSTKTIQQKDFNRDRDYWWNQYFYMRKIRRFVRGKKQFDFSINTDGISVSLQYSAKKKTANKEIDQKSRIIQKIEDGTIKNFSGVDTGVRSWNTTTTHDIETGKETNFVMSSKQFHWQTDQKVRNAKAARWTKNFVEMERADRENRELYPVMPSPKGSMWLNYIKHRVKMMKHGICAYSTAKYTRLALDKHIKSSSVVDEWVNKVTDKKPTLFFFGADGEIPPDSPISIKKHVRCPGVRKTLRSIKKRRDCFIQLVDEWGTSQTDARCMNRFQNQNKAARFKKCRCVPDARTLLPTKIVSKLGKTDLSIYRQLQRAMNEEALVGDESLFPKVKCYYKNWRLNLECSVIWHRDVVAAKNILLKGLWTLLGLPIPEAINRYWREAAEAAAAAAARATAEAAAAAVAIVDNDVEMFEYDQQPADHAV

SEQ ID NO: 4189 - protein, 728 aa, Sitodiplosis mosellana
MKRKRAQNGRPRSVKLSLNSVLRDQYRVNFVAQVNNWCHTATVITVLASLLFLFENNRAFDEDNHGFFSGNGYELIKDCFKNILNENRHKLPLAFRQIIEAAVPNFRWPQREGMGNAFNQLIDQYTTNVKNNIKTWCYTRIKTFFVLQRYELNLLGHNISDIDVKNATKSVMFNNIVPSANVERLLEQARMIGIPVGTKLCDLVRGSWFQTIPIFITIQRLVFNHHERYELLNDLWRRYYRDRLHNAMPSIARPPKIKNFRVIPIHDFKMKHIRIDIHLFYQMACKLGAIKLAKGLFGQPVNISKKVYDSNPFVSWDTIFNMDKIQKVGNRKTFDYTIVTDSVAVSLCFLKPECPSHEYSHEQINEMYENGVFRFVLGMDPGVRTWNATVRKHIASGVEENITIDGPKYHFRAKYGKRKRKSEKWLRLFTELEQHDRNQYPLYPSPKGASNWMSYIEHRVKMLQPGMEVYTARKYIRLNLDKHIEETRASDTIAAFLTRKLPSLIFLGAAQMAPNSPIGIKKRLRCPGARKLLNSFKKLHNCVVVMVDEFKTSQTCAKCFRPFDRRTRNDRYKVCRQCIPHAANITNDKHLSSVIISKKSNRSYQRERRHVVAEYERLNVHPVYSHGLVPKLNVWFKNWQLNTDNTWNDSRHPHQQNTVWHRDEVAAKCILYKGLCMIKGLDVHPQLSRQHHAAAAAAHNNAEGDQDDNDSDSDDDYVYVLDDVSDEE

SEQ ID NO: 4190 - protein, 651 aa, Sitodiplosis mosellana
MVMKSSKCASKVCSGKITPMIECLWSQVSGNSFKYLYEQYATNVKTNLKTHCEKRLRKFFKMRCYELNHMCLCGDLELDELFDGDDIKNSINYTYNRRDSTRGNANAIRKLEILLAELYWIGAPHRPDDPHPFNIREFVELNWFQALRMFINIQRDIHNFHLSFANLRRSWNLFRKHPLYVQEPEFPEPPEITTFTVIPKCTFQRRHVKIDTDSLYNILCGIKAMKREDGLRVNKKGEVLQRYISQTEFKRIGSWRSYFNMDEINKLVKNKKEFGDSIISDGVSASVLFKLPKQSKTVADEDEAETKRKYFANEFAYALGIDPGMRTFIASVRLDLKTGEETNKKISFKQYHQKSKQDARNIKAERMTRVFTYDEQADLKRIAAEIGQTPSPRNISWRHYIEHRLRMSQDGIAAYSQKNYARLRLDKHIEWRRAIDLIAGKLVHFKTAIINIGAAEISPNCPIRIKKYVRCPGVRKLIAAFKRRGNCVVRLVDEYMTSQHCARCFKRFPIWTKSKRYKKCNDCQPDERVGLPRTIYTNVSKRVLQMQRKIMRTWEEMRDQGDAIAAILTQRNSGRLVSKKQRFFKTWQPNAAENAGTEDAAQSRKLLKSLWHRDISAAKLIMYKGLCTLLDIPIHPALLRRPDDDGVPLNP

SEQ ID NO: 4191 - protein, 656 aa, Sitodiplosis mosellana
MKYLFQQYGRNVKTNLDTHAQKRLRYFLRLKAFRQNYTNRIRSLPDTYDERDIKNAVSWAMKRYDETRGDADRLAKRDRLLLYVRDIRGPADDDIAKFTKDEDTWFASLPMWLIMQSEIETHLNWVEQHHDNIVQVIALPNIKNLVVIPICHHTRKAVRIDADVLYRMMCGTGTIPRDEYGRQHSGSDVTSKSNQAYYFNMIFNMEKINRVLKANKKFEHILSDGVSASILYTVKKTVVDKLVEDGLVRKRYSDGFYVYELGIDWGMKTWNATVRRRINNDKERIHNGKEMNFTINSKKYHYCTEDGVRKKKRERWTRAFGQFEESDRNNRARYDRMPSPKGSNWRDYIRHRFTIMKKAIAVYTTEKYTRLSFDHYIKSNRVSDKVAAMLTNRKRCIINIGTSQPPANSPIQIKKHVRCPGVRKLVKSFKKMEGNVIRFVNEARSSRLCARCFEPFPLSTLNDRVKVCEWCMPDQDDWPDGMKLPEKIVAAKSKRKLRSERRAMRQAAVQNPNQPRGFVSKVICYRKNWQQNAANGMDDNVEERRGVIIHDAELGIIEYTDEFVPEDPVDDSPVLKTVWQRDISAAKLILYRALSGVPQGSHPGPTLFLIFINGIVDQMPSDIMILLFDDDIKIAKIIKYQQDSEILQQAIDKLKH

SEQ ID NO: 4192 - protein, 408 aa, Sitodiplosis mosellana
MWLTMQTEVDNFHIWAEENGIEIPKIKNLKVILIHQFMRQHVKMETDYEIVEDPMSQCWDEIFDMPKIHRLLKSNKRFRPYISSNGQAVSIMYEVPKSHLDRLVDDEIVRKRYRDGVYVYEIGIDPGMRTWNATVRRNIETGKEINFTISSKRYHYLARQGVWDRRAEQWTRQFVAEEQHDRERYQRMPSPKGENWGSYIAHRLTMLKKGIETYTTEKYARLQFDKYIQSNRATNKIANLLTNRKPSIIHMGAVDMPANSPIRIKKHVRRPGNPTQRDRMKVCEWCLPDNDDWPPNLQLPTKIVSKKSNRTLIADRQRMREAVEQDPNQAEHFVSKLISYQKNWQQSAAIDEDADPAEQEDAVESHDRRILKICWHRDITAAKLILYKGHCHLFGIQLLFIFTIERIR

SEQ ID NO: 4193 - protein, 508 aa, Sitodiplosis mosellana
MWIKIQRNISYFHTTYGILNSDWAKYKSDRVTNKMPLVPRPPKVKNFIAIPVHDFDLKHIRIDVTLLYEIARGLGALKHAIGKSGRKVSISREVYNKNPAQWWKHVFKMKKINKIGGRKMKFDCSIMTDSVSVSLMYIKSNRTLDAKDLKTIEDMYREGRFVYELGIDPGVRTWNATVRRTVATGDEENITIAGPTYHWRAKRSKRRQKEERWQRTFKEQQQRDLRSYPVVPSPKSKDAWKSYICHRLTMMALGIAVFGTRKYARLSFDKYVESTRASDKIAASLTNKKPSMIYLGAAQMAPNSPIGIKRRLRCPGTRKLLASFKKLNNCTVRFVDEYFTSQTCAKCFGRFDPRTKRNRFKVCRQCWLNGYDGQILPNKIVTTLSNRELKKERREKKQERMQQNVNNNQPRNAANPTRPAKTRLVSKLCKYYKCYSNEAGDLEWYASHINQEVTNWHRDVVAAKCILYKGRCEVFGYRIHPNLSRPVQHNEQNIDSDYEHISEVEDDE

SEQ ID NO: 4194 - protein, 809 aa, Sitodiplosis mosellana
MYEYIQKDWFESLWMWIGMQRIVEKFLIDTAHLREQWKAYDRDPVNNRDPSVPKIPKVKNFAAIPLCDTKLKHIPFDHDDLINIIGQLRNERGWDIRADYRTYYKQGENKDEAWGIVFDMDKIRQLRTGSKEFYHKNQTNSSAVSVLFSRPKRKGAGVTLSEIKAKYEKPVSKGGYKYESGIDPGQKTKMACVRRTLATGIETNIKLSSIQYHWGARQGMRDKQATKMTRKYVHKEQRDLKSYPITSVSPRGSQWKSFIKHKIKMLTDSLATYARRKYAQLSLHKYIESNREMDLMAKHITNNETGVVYLGDAAFPSNSKIGVKRTKRSPDQRKFIVSLKKNGKTDVVLTPEPYTSQTCANCLRRFPRSTKSDRFKVCKDCRPHKDVRLPLVIVTDRSRRRKQRDRKQNASQKPTANVTRAEKAEKHREKRRSERESHNPEQLDTEEAVRRYNRRIRRRELRQRRRVAGHRSRKVTKQPEAESDLPGSIGIELVALIHSEVAGKNPDEKHGDRLGRLSFKICELLTQNDLQIVSQPFELKKSGPTSKIIMSLALKILKRSENGSSDLTPLEDTPIEEAEEPQEENAVSDGENAPESDVHAEKVSNLGSSLVESGPRNGESSLCCYGLGSIKLTLHYSVELQYLSVTVHKIINIPVKDQSVALNPYVKLYLLPGRSSDSKRKTKVVKDSSDPIYEENFRYLLSPAELRVRKLEVVVSTRNAFYALLHGSGSIVGKHLLQYIPKKYHDFYKAIKFSDSDELKKDYALASRQSSDEDSELSMSDSFDESDGDGEAANTNANDEDVYEFRMSE

SEQ ID NO: 4195 - protein, 551 aa, Sitodiplosis mosellana
MYSTRLLRCYYVQHQPQNITAAQQKVAIEHTVKYLFNPVSRVNADDDLLQFAEDVILTNFVLDRGSLAGAKDKFGFNWFQYIPYFIRAQLYIDSVNQNNSSVEDHIVNFIVVPQHNYSRLFADLDGIGMVQLYNFEAPYGQALNERHGAQAFERLFHANQLRRQVRENNALYVRTDGVHLDVLYKKRSNRKLFPMLVGLSGKDKTAAIGEFNEIHRVRMRNTFRQRQYRYLIGIDFGSEHMIVFTSVDLNDGNAETVGYLSTKQYYKLMKHDEYVEEKNKIIAGFQKKQSQNRKWVESEYRVTPSATSPAFMQYIDHRLRLFTEGTDVFMNEELAILEFRQYQRKQAVLQLIVQEVTLGERCAVKLGLNPIGANSHIKGNPRGPINDVIEEFETAENVDIYVGDEYNSSQMCSKDHKQMKFTQFEILPPPPRWRKIVLAVTAPGKIQIFRPNLENASYAAARTLAYRYKKIEPDEAKPHWNKVLELSRTMCSHVMWYNKCADANDCNFWRIDEKMDMDAKEDVASDEDIDEDDNISVAQPYSSDSDDDPLY

SEQ ID NO: 4196 - protein, 764 aa, Sitodiplosis mosellana
MANRFKPSIPAEGETKDEITTIKCALKTIIRPQYQQALMSKITDLSVENNDFALFGGSGEDKIKLCFEQVLWHNNQPPKPKSTYKPRGEKPRGPRAELPRIDPEFKAIVEGLDDYHRIDWPNNKDFCNGLKHLTNQYTDNVVTNLKTHANKHITQYLKLKVFQWNSDVGDDAEKFLPSDIASVVNLIVKQKDIKVPIRDPNKLERCSVLYDMVNDLNVFPEIDLHDLTTDPKHWFKAMPMYLSMQREIEEYNSEWPHQRRPKRKKRKRKKTKGKWKRKRSQMLDNPDFRPLIRNLVVVPMCDFRRTHFKIDCSSMHQVLSSQKLLPKVEIENKKGTTSTKTIQQKDFNHSRDYWWNQYFYMRKIRRFVRAKKQFDYSINTDGISVSLQYSAKKKTDNKEIDQKSRIIQKIEDGTIKNYSGVDTGVRSWNTTTTHDIETGKETNFVMSSKQFHWQTGQKVRNAKAKRWTKNFVEMERADRENRDLYPVMPSPKGSTWLNYIKHRVKMMKHGICAYSTAKYTRLALDKHIKSSSVVDEWVNKVTDKKPTLFFFGADGEIPPDSPISIKKHVRCPGVRKTLRSIKKRRDCFIQLVDEWGTSQTDARCMNRFQNQNKAARFKKCRCVPDARTLLPTKIVSKLGKTDLSIYRQLQRAMNEEALVGDERLFPKVKCYYKNWRLNLECSVIWHRDVVAAKNILLKGLWTLLGLPIPEAINRYWREAAEAAAAVAAAAAARATAEAAAAAVAIVDNDVEMFENDQQPADHAV

SEQ ID NO: 4197 - protein, 760 aa, Sitodiplosis mosellana
MANRFKPSIPAEGETKDEITTIKCALKTIIRPQYQQALMSKITDLSVENNDFALFGGSGEDKIKLCFEQVLWHNNQPPKPKSTYKPRGEKPRGPRAELPRIDPEFKAIVEGLDDYHRIDWPNNKDFCNGLKHLTNQYTDNVVTNLKTHANKHITQYLVLKVFELNSNLEEDGEKFLPSDIENVVKLIIKQKDIKVPSRDPNKLVRCEVLYDIVRDCNVFPEIDLHDLTTDPKHWYKAMPMYLSMQREIEEYHAMWPHQHRSKRKKRKRKKTKGKWKRKRRQMLDNPDFRPLIRNLVVVPVCDFRRTHFRIDCTSMRQVLSSQKLLPKVEIENKKGTTSTIIIPEKDFNRDRDYWWNQYFYMRKIRRFVRAKKQFDFSINTDGISVSLQYSAKKKTANKETDQKSRIIQKIEDGTIKNFSGVDTGVRSWNTTTTHDIETGKETNFVMSSKQFHWQTDQKVRNAKAARWTKNFVEMERADRENRELYPVMPSPKGSMWLNYIKHRVKMMKHGICAYSTAKYTRLALDKHIKSSSVVDEWVNKVTDKKPTLFFFGADGEIPPDSRISIKKHVRCPGVRLTLRSIKKRRDCFIQLVDEWGTSQTDARCMNRFQNQNKAARFKKCRCVPDARTLLPTKIVSKLGKTDLSIYRQLQRAMNEEALVGDESLFPKVKCYYKNWQLNLECSVIWHRDVVAAKNILLKGLWTLLGLPIPEAINRYWREAAEAAAAAAARATAEAAAAAVAIVDNDVEMFEYDQQPADHAV

SEQ ID NO: 4198 - protein, 202 aa, Sitodiplosis mosellana
MAPNSPIEIKRRLRCPGTRKLLVSFKKLNNCTVRFVEEYFTLQTCAKCFGRFDPRTKRNRFKVCRQCWLNGYDGQILPNKIVTTLSSRKLKKAHKEEKDERTQQNVNNNQPRNAANPTRPAKTRLVSKLCKYYKCHSNQAGDLEWYASHIDQNVTNWHRDVVAAKCILYKGRCEVFGYRIHPNLSRPVQHNEQNISEDEDDE

SEQ ID NO: 4199 - protein, 728 aa, Sitodiplosis mosellana
MKRKRAQNGRPRSVKLSLNSVLRDQYRANFVAQVNNWCHTATVITVLASLLFLFENNRAFDEDNHGFFSGNGYELIKDCFKNILNENRRKLPLAFRQIIEAAVPNFRWPQREGMGNAFNQLIDQYTTNVKNNIKTWCYTRIKTFFVLQRYELNLLGHNISDIDVKNATKSVMFNNIVPSANVERLLEQARMIGIPVGTKLCDLVRGSWFQTIPIFITIQRLVFNHHERYELLNDLWRRYYRDRLHNAMPSIARPPKIKNFRVIPIHDFKMKHIRIDIHLFYQMACKLGAIKWAKGWIGQPVNISKTVYDSNPFVSWDTIFNMDKIQKVGNRKTFDYAIATDSVAVSLCFLKPECPSHEYSHEQINEMYENGVFRFVLGMDPGVRTWNATVRKHIASGVEENITIDGPKYHFRAKYGKRKRKSEKWLRLFTELEQHDRNQYPFYPSPKGASNWMSYIEHHVKMLQPGMEVYTARKYIRLNLDKHIEENRASDTIAAFLTRKLPSLIFLGAAQMAPNSPIGIKKRLRCPGVRKLLNSFKKLHNCVVVMVDEFKTSQTCAKCFRPFDRRTRNDRYKVCRQCIPHAANITTDKHLSSVIISKKSNRSYQRERRHVVAEYERLNVHPVYSHGLVPKLNVWFKNWQLNTDNTWNDSRHPHQPNTVWHRDEVAAKCILYKGLCMIKGLDVHPQLSRQHHAVAAAAQNNPEGDQDDNDSDSDDDYVYVLDDVSDEE

SEQ ID NO: 4200 - protein, 480 aa, Sitodiplosis mosellana
MYEYIQRDWFESLWMWIGMQRIVEKFLIDTAHLRQQWKVYDRDPVNNREPSVPKIPKVKNFAAIPLCDTKLKHIPFDHNDLIDIIGQLRNERGWDIRADYRTYYKQGENKDEAWGIVFDMDKIRQLRTGSKEFFHKIQTNSSAVSVLFSRPKRKGAGVTLSEIKAKYEKPVSKGGYKPTSNYRVFNITGVRDKQATKMTRKYVHKEQRDLKSYPITSVSPRGSQWKSFIKHKIKMLTDSLATYARRKYAQLSLHKYIESIREMDLMAKHITNNETGVVFLGDAAFPSNSKIGVKRTKRSPDQRKFIVSLKKNGKTDVVLTPEPYTSQTCANCLRRFPRSTKSDRFKVCKDCRPHKDVGLPPVIVTDRSRRRKQRDRKRNASQKPTANVTRAERAEKHRENRRSERESHNPEQLDTEEAVRRYNRRIRRRELRQRRRVAGHRSRKVTKQPEAESDLPGFKGYGQNVEMANRDGQSNAVDDK

SEQ ID NO: 4201 - protein, 757 aa, Sitodiplosis mosellana
MKIDETKTEKKVLDNDGGKSTRSKRKLMTQNKAQKSIEEKYAASENIARKDPEPTKPLTIAKPDFAVNEIVWSKIKGNAPWPARIERIIITPAGRTMYEVYWYNDYRRSKVFKLQGSIMGGKRIGAHAIRGNRSKPRKVEDGKQKEEKAYFAIKLAAASIVRPEYRDRILPWITKTSIKCTEISELASLLFLNKVRAATEQAIITGNWEYFDDGDGMHIIENCFYAVLRRYKEDDFIMDPWFRHCFENVDIENRSAWPNNDYFGNLMKYLFQQYGRNVKTNLDTHAQKRLRYFLRLKAFRQNYTNRIRGLPDTYDERDVANAVSWAIKRYDATRGDANRLAKRDRLLRYVRDIRGPADDDIAKFTKDEDTWFASLPMWLIMQSEIETHLNWVEQHHDNIVQVIALPNIKNLVVIPICHHTRKAMNFTINSKKYHYGTGEGVRKEKRERWTRAFGQFEESDRNNRVRYDRMPSPKGSNWRDYIRHRLTIMKKAIAVYTTKKYTRLSFDHYIESNRINDKVAAMLTNRKRCIINIGASQPAANSPIKIKKHVRCPGVRKLVKSFKKMEGNVIRFVNEARSSRLCARCFEPFPLSTLNDRVKVCEWCMPDQDDWPDGMKLPEKIVAAKSKRKLRSERRAMRQAAVQNPNQPRGFVSKVICYRKNWQQNAANGMDDNVEERRGVIIHDAELGIIEYTDEYVPEDPVDDSPVLKTVWQRDISAAKLILYRGHCELFGHRLHDAFTRQHLVYPTRFRVNFNIH

SEQ ID NO: 4202 - protein, 226 aa, Sitodiplosis mosellana
MPLVPRPPKVKNFIAIPVHDFDFKHIRIDVKHFYEIACGLGALKHAIGKRGGKRFRFVHVRQIRTLDAKDLKIIEDMYREGRFVYELGIDPGVRTWNATVRRTVATGKHHDCWSNVSLEGETTNRKQKEERWQRTFKEQQQRDLRSYPVVPSPKSKDAWKSYICHRLTMMAVGIAVFGTRKYARLSFDKYVESTRASGKIAASLTNKKPSMIYLGAAQTKVLHLSV

SEQ ID NO: 4203 - protein, 541 aa, Sitodiplosis mosellana
MARGARGSRGGSDDRFTTVKLALRTIIQKPYRLILTTVIGEMSIMATLISLLASLYFLYLVNTAIDDFNNDFFNSDGDEIIKMCFQVIPKCTFQRRHVKIDTDSLYNILKGIKAMPRTKGTRVLRDGEYQERWISQIEFKERGGWRLFFNMDEIIKLVKNKKEFGDSIVSDGVSASVLFKLPKQSKTVTDEEEAETKRKYFANEFAYALGIDPGMRTFIASVRLDLKTGEETNEKISFKQYHLKSKQDARNIKAERMTRVFTYDEQADLKRIAAEIGQTPSPRNISWRHYIEHRLRMSQDGIAAYSQKNYARLRLDKHIEWRRAIDLIAGKLVHFKTAIINIGAAEISPNCPIRIKKYVRCPGVRKLIATFKRRGNCVVRLVDEYMTSQHCARCFKRFPIWTKSKRYKKCNDCQPDERVGLPRTIYTNVSKRVLQMQRKIMRTWEEMRDQGDAIAAILTQRNSGRLVSKKQRFFKTWQPNAAENAGTEDAAQSRKLLKSLWHRDISAAKLIMYKGLCTLLDIPIHPALLRRPDDDGVPLNP

SEQ ID NO: 4204 - protein, 593 aa, Sitodiplosis mosellana
MGRKRIGAHVVRGNRSKPRKVEDGKQKEEKAYFAIKLAAASIVRPEYRDRILPWITKTSIKCTEISELASLLFLNKVRAATEQAIITGNWEYFDDGDGMHIIENFFFAVLRSYKEDDFIMDPWFRHCFENVDTENRSAWPNNDYLGNLMKYLFQQYGRNVKTNLDTHAQKRLRYFLRLNAFRQNYTNRIRGLPDTYDERDVANAVSWAMKRYDATRGDADRLAKRDRLLLYVRDIRGPADDDIAKFTKDEDTCDGVSASILYSVKKTVVDKLVEDGLVHKRYSDGFYVYELGIDWGMKTWNATVRRRINNDKERIHNGKEMNFTINSKKYHYCTGEGVRKKKRERWTRAFGQFEENDRNNRVRYDRMPSPKGSNWRDYIRHRMTIMKKAIAVYTTEKYTRLSFDHYIESNRVSDKVAAMLMFRTVSIEYIERSFKVCEWCMPDQDDWPDGMKLPEKIVVAKSRRKLRSERRAMRQAAVQNPNQPRGFVSKVICYRKNWQQNAANGMDDNVEERRGVIIHDAELGIIEYTDEFVPEDPVDDSPVLKTVWQRDISAAKLILYRGHCELFGHRLHDAFTRQRLVYPTRFRVNFNNH

SEQ ID NO: 4205 - protein, 951 aa, Sitodiplosis mosellana
MKSRTMANRFKPSIPAEGETKDEITTIKCALKTIIRPQYQQALMSKITDLSVENNDFALFGGSGEDKIKLCFEQVLWHNNQPPKPKSTYKPRGEKPRGPRAELPRIDPEFKAIVEGLDDYHRIDWPNNKDFCNGLKHLTNQYTDNVVTNLETHANKHITQYLVLKVFELNSNLEEDGEKFLPSDIASVVNLIIKQKDIKVPIRDPDKLVRCEVLYDIVRDCNVFPEIDLHDLTTDPKHWYKAMPMYLSMQREIEEYHAMWPHQHRSKRKKRKRKKKKGKWKRKRRQMLDNPDFRPLIRNLVVVPMCDFRRTHFKIDCSSMHQVLSSQKLLPKVEIENKKGTTSTKTIQQKDFNHSRDYWWNQYFYMRKIRRFVRAKKQFDYSINTDGISVSLQYSAKKKTDNKEIDQKSRIIQKIEDGTIKNYSGVDTGVRSWNTTTTHDIETGKETNFVMSSKQFHWQTGQKVRNAKAKRWTKNFVEMERADRENRDLYPVMPSPKGSMWLNYIKHRVKMMKHGICAYSTAKYTRLALDKHIKSSSVVDEWVNKVTDKKPTLFFFGADGEIPPDSPISIKKHVRCPGVRKTLRSIKKRRDCFIQLVDEWGTSQTDARCMNRFQNQNKAARFKKCRCVPDARTLLPTKIVSKLGKTDLSIYRQLQRAMNEEALVGDERLFPKVKCYYKNWRLNLECSVIWHRDVVAAKNILLKGLWTLLGLPIPEAINRYWREAAEAAAAVAAAAVAIVDNDVNGEKVAIILLDTQGIFDHQSTRRDCTTTFALSMLLASVQCYNVMQNVQEDDLENLEMFTEYGRLAIEQTHQKPFQKLLFIIRDWPNAFETGYGWNGQQVIDEILSEADGQTAENHQLRERIKSSFEEVKAFLMPHPGRAVANGTFTGQLQQIDPEFIEYVKQLVPALFAPENLVIKKINNERVRILMAAQRPLFRPKVTDFFNIFFEH

SEQ ID NO: 4206 - protein, 775 aa, Sitodiplosis mosellana
MGYQRKKAKKKGKPIAVLGDVIEEDEKEKDSGIRTVKTQLRAILRPEYRDLLIAAITDRSMMATKICALASQLFLFRCERAFEDNDKGFFEQNGEKVIRSCFFGVLKKNIYKKKKMPPEFRKMVQQLDDSHRVVWPNADYFGNGMNDLIDTYVTNVKNNLKTHSKKRLREWLRVKVFESSLVARYEQADIDRVISLAIFGNDDITINGMDDVAKRERRTLLIGMVTKNSWWDIPDNNIGRFTNGKDWFKSIAFWISLQRKIDDFNTCEEYREERRYQREEFEELKRCRRRNHRPCTCQQPVDRGQNGNEYIEKGPPRVKNLAVIPICSFTRTHFTLDIRTLYFLLRQLGIVPLNITEDEFRKQKEYYWDQYFDMRKIYHLGRSRKKFRFRILSNGQAVSLQFDIDKTKMSNMEPDKKAIVQNYKKFVNEGATDPGVNTWNATTVHNIATGKEANYTISSKQYHYWTKQTVRNRQGKRWTKDFIKEERQDRENRALYPVMPSPLGRHWEDYIRHRLKMTERGIAVYTTDKYTRLNFDKYVRANSVTDSIAGMLTNHQPTLMHFGAAQMSPSSPIGIKKTLRCPGNRKMIRSYKKCRGCVVNMVDEYYTSQTCAKCFGRFDRRTKRHRFKVCHDCRPQSVVRAMLPSMIVCKVNKRKMRHEKLKLFLLEKEAEEGNGNPAVGNDVPHPDQLNPELLPKVAIYHKTWHVNESSGILEYVKFNSAGEMEVVEPRLHKTTWHRDIAAAKCILIKGHCDLFGFKLPETLQRPSNQRAAVNN

SEQ ID NO: 4207 - protein, 757 aa, Sitodiplosis mosellana
MGRKRIGAHAIRGNRSKPRKVEDDKQKEEKSYFAIKLAAAIRAATEQSIITGNWEYFDDGDGMHIIENCFYAVLRRHKEDNFIMDSWFRHCFENVDTENRSAWPNNDYFGNLMKYLFQQYGRNVKTNLDTHAQKRLRYFLRLKAFRQNYTNRIRGLPDTYDERDVANAVSWAIKRYDATRGDADRLAKRDRLLLYVRDIRGPADDDIAKFTKDEDTWFASTICQLQKYAKLAPPNELDLSTHVYVRFGQTEIETHLNWVEQHHDNIVQIIALPNIKNLVVIPICHHTRKAVRIDADVLYRMMCETGTIPRDEYGRQYTVDHVTSKSNQAYYFNMIFNMEKINRVLKANKKFEHILSDGVSASILYSVKKTVVDKLVEDGLVRKRYSDGFYVYELGIDWGMKTWNATVRRRINNDKERIHNGKEMNFTINSKKYHYCTGEGVRKEKRERWTRAFGQFEESDRNNRARYDRMPSPKESNWRDYIRHRFTIMKKAIAVYTTEKYTRLSFDHYIESNRVSDKVAAMLTNRKRCIINIGASQPPANSPIQIKKHVRCPGVRKLVKSFKKMEGNVIRFVNEARSSRLCARCFEPFPLSTLNDRVKVCEWCMPDQDDWPDGMKLPEKIVAAKSKRKLRSERRAMRQAAVQNPNRPRGFVSKVICYRKNWQQNAANGMDDNVEERRGVIIHDAELGIIEYTDEYLPEDPVDDSPVLKTVWQRDISAAKLILYRGHYELFGHRLHDAFTRQHLVYPTRFRVNFNVH

SEQ ID NO: 4208 - protein, 752 aa, Sitodiplosis mosellana
MGAHAIRGNRSKPRKVEDGKQKEEKAYFAIKLAAASIVRPEYRDRILPWITKTSIKCTEISELASLLFLNKVRAATEQAIITGNWEYFDDGDGMHIIENCFYAVLRRYKEDDFIMDPWFRHCFENVDIENRSAWPNNDYFGNLMKYLFQQYGRNVKTNLDTHAQKRLRYFLRLKAFRQNYTNRIRGLPDTYDERDVANAVSWAIKRYDATRGDANRLAKRDRLLRYVRDIRGPADDDIAKFTKDEDTWFASLPMWLIMQSEIETHLNWVEQHHDNIVQVIALPNIKNLVVIPICHHTRKAVRIDADVLYRMMCETGTIPRDEYGRQHTVGHVTSKSNQANYFNMIFNMEKINRVLKANKKFEHILSDGVSASILYTVKKTVVDKLVEDGLVRKRYSDGFYVYELGIDWGMKTWNATVRRRINNDKERIHNGKEMNFTINSKKYHYGTAEGVRKEKRERWTRAFGQFEESDRNNRARYDRMPSPKGSNWRDYIRHRLTIMKKAIAVYTTKKYTRLSFDHYIESNRVSDKVAAMLTNRKRCIINIGASQPAANSPIKIKKHVRCPGVRKLVKSFKKMEGNVIRFVNEARSSRLCARCFQPFPLSTLNDRVKVCEWCMPDQDDWPDGMKLPEKIVAAKSKRKLRSERRAMRQAAVQNPNQPRGFVSKVICYRKNWQQNAANGMDDNVEERRGVIIHDAELGIIEYTDEYVPEDPVDDSPVLKTGIANSLDIGCMMRSHVQHLVYPTRFRVNFNIH

SEQ ID NO: 4209 - protein, 860 aa, Sitodiplosis mosellana
MKAIEAVIGIENKEAFLKKLSSVCTDGTNMNVGENNSLWVLLDEEMSAIKSEIPLIKVWCAAHRAELAWGDTGRKERESRHATTSFEEIRKEVLNSLQDFLENRFEADDAFVRMIAPFITFDSNADIEAIHATVAPDLNLPSLSLQFQDIVSDREAYDVLNFSYFTLWGGKRIGAHAIRGNRSKPRKVEDGKQKEEKAYFAIKLAATSIVRPEYRDRILPWITKTSIKCTEISELASFLFLNKVRAATEQAIITGNWEYFDDGDGMHIIENCFYAVLRRYKEDDFIMDPWFRHCFENVDIENRSAWPNNDYFGNLMKYLFQQYGHRTTLTGFDGLPDTYDERDVANAVSWAIKRYDATRGDANRLAKRDRLLRYVRDIRGPADDDIAKFTKDEDTWFASLPMWLIMQSEIETHLNWVEQHHDNIVQVIALPNIKNLVVIPICHHTRKTVRIDADVLYRMMCGTGTIPRDEYGRQYTVGHVTAKSNQAYYFNMIFNMEKINRVLKANKKFEHILSDGVSASILYSVKKTVVDKLVEDGLVRKRYSDGFYVYELGIDWGMKTWNATVRRRINNDKERIHNGKEMNFTINSKKYHYGTGEGVRKEKRERWTRAFGQFEESDRNNRVRYDRMPSPKGSNWRDYIRHRLTIMKKAIAVYTTKKYTRLSFDHYIESNRVSDKVAAMLKNRKRCIINIGASQPAANSPIKIKKHVRCPGVRKLVKSFKKMEGNVIRFVNEARSSRLCARCFEPFPLSTLNDRVKVCEWCMPDQDDWPDGMKLPEKIVAAKSKRKLRSERRAMRQAAVQNPNQPRGFVSKVICYRKNWQQNAANGMDDNVEERRGVIIHDAELGIIEYTDEYVPEDPC

SEQ ID NO: 4210 - protein, 675 aa, Sitodiplosis mosellana
MDNSHELTLNNISSVDNEPPKPKSTYKPRGEKPRGPRAELPRIDPEFKAIVEGLDENHRIDWPNNKDFCNGLKHLTNQYTDNVVTNLKTHANKHITQYLVLKVFELNSNLEEDGEKFLPSDIENVVKLIIKQKDIKVPIRDPDKLVRCEVLYDIVRDCNVFPEIDLHDLTTDPKHWYKAMPMYLSMQREIEEYHAMWPHQHRSKRKKRKRKKKKGKWKRKRRQMLDNPDFRPLIRNLVVVPMCDFRRTHFKIDCSSMHQVLSSQKLLPKVEIENKKGTTSTKTIQQKDFNRDRDYWWNQYFNMRKIRRFVRAKSQFDYSIKTDGISVSLQYSAKKKTANKEIDQKSRIIQKIEDGTIKNYSGVDSGVRSWNTTTTHDIETGKETNFVMSSKQFHWQTGQKVRNAKAKRWTKNFVEMERADRENRDLYPVMPSPKGSMWLNYIKHRVKMMKHGICAYSTAKYTRLALDKHIKSSSVVDEWVNKVTDKKPTLFFFGADGEVPPDSRISIKKHVRCPGVRKTLRSIKKRRDCFIQLVDEWGTSQTDARCMNRFQNQNKAARFKKCRCVPDARTLLPTKIVSKLGKTDLSIYRQLQRAMNEEALVGDESLFPKDYGHYWDFRYQRRSIGIGAKLLKQPLLLPLLLPLEQPLKQPLLLVAIVDNDVEMFEYDQQPADHAV

SEQ ID NO: 4211 - protein, 577 aa, Sitodiplosis mosellana
MGNAFNQLIDQYTTNVKNNIKTWCYTRIKTFFVLQRYELNLLGHNISDIDVKNATKSVMFNNIVPSSNVERLLEQARMIGIPVGTKLCDLVRGSWFQTIPIFITIQRLVFNHHERYELLNDLWRRYYRDRLHNAMPSIARPPKIKNFPVIPIHDFKMKHIRIDIHLFYQMACKLGAIKLAKGLFGQPVNISKKVYDSNPFVSWDTIFNMDKIQKVGNRKTFDYTIVTDSVAVSLCFLKPECPSHEYSHEQINEMYENGVFRFVLGMDPGVRTWNATVRKHIASGVEENITIDGPKYHFRAKYGKRKRKSEKWLRLFTELEQHDRNQYPFYPSPKGASNWMSYIEHRVKMLQPGMEVYTARKYIRLNLDKHIEENRASDTIAAFLTRKLPSLIFLGAAQMAPNSPIGIKKRLRCPGVRKLLNSFKKLHNCVVVMADEFKTSQTVIISKKSNRSYQRERRHVVAEYERLNVHPVYSHGLVPKLNVWFKNWQLNTDNIWNDSRHPHQQNTVWHRDEVATKCILYKGLCMIKGLDVHPQLSRQHHAAAAAAQNNAEGDQDDNDSDSDDDYVYVLDVVSDEE

SEQ ID NO: 4212 - protein, 702 aa, Sitodiplosis mosellana
VENNDFALFGGSGEDKIKLCFEQVLWHNNQPPKPKSTYKPRGEKPRGPRAELPRIDPEFKAIVEGLDDYHRIDWPNNKDFCNGLKHLTNQYTDNVVTNLETHANKHITQYLVLKVFELNSNLEEDGEKFLPSDIASVVNLIIKQKDIKVPIRDPDKLVRCEVLYDIVRDCNVFPEIDLHDLTTDPKHWYKAMPMYLSMQREIEEYHAMWPHQHRSKRKKRKRKKKKGKWKRKRRQMLDNPDFRPLIRNLVVVPMCDFRRTHFKIDCSSMHQVLSSQKLLPKVEIENKKGTTSTKTIQQKDFNHSRDYWWNQYFYMRKIRRFVRAKKQFDYSINTDGISVSLQYSAKKKTANKEIDQKSRIIQKIEDGTIKNFSGVDTGVRSWNTTTTHDIETGKETNFVMSSKQFHWQTDQKVRNAKAARWTKNFVEMERADRENRELYPVMPSPKGSMWLNYIKHRVKMMKHGICAYSTAKYTRLALDKHIKSSSVVDEWVNKVTDKKPTLFFFGADGEIPPDSPISIKKHVRCPGVRKTLRSIKKRRDCFIQLVDEWGTSQTDARCMNRFQNQNKAARFKKCRCVPDARTLLPTKIVSKLGKTDLSIYRQLQCAMNEEALVGDERLFPKVKCYYKNWRLNLECSVIWHRDVVAAKNILLKGLWTLLGLPIPEAINRYWREAAEAAAAAVAIVDNDVEMFENDQQPADHAV

SEQ ID NO: 4213 - protein, 718 aa, Sitodiplosis mosellana
VENNDFALFGGSGEDKIKLCFEQVLWHNNQPPKPKSTYKPRGEKPRGPRAELPRIDPEFKAIVEGLDDYHRIDWPNNKDFCNGFKHLTNQYADNVVTNLTTHANKHITQYLKLKVFQWNSDVGDDAEKFLPSDIASVVNLIVKQKDIKVPIRDPNKLERCSVLYDMVNDLNVFPEIDLHDLTTDPKHWFKAMPMYLSMQREIEEYNSEWPHQRRPKRKKRKRKKTKGKWKRKRSQMLDNPDFRPLIRNLVVVPMCDFRRTHFKIDCSSMHQVLSSQKLLPKVEIENKKGTTSTKTIQQKDFNHSRDYWWNQYFYMRKIRRFVRAKKQFDYSINTDGISVSLQYSAKKKTDNKEIDQKSRIIQKIEDGTIKNYSGVDTGVRSWNTTTTHDIETGKETNFVMSSKQFHWQTGQKVRNAKAKRWTKNFVEMERADRENRDLYPVMPSPKGSTWLNYIKHRVKMMKHGICAYSTAKYTRLALDKHIKSSSVVDEWVNKVTDKKPTLFFFGADGEIPPDSPISIKKHVRCPGVRKTLRSIKKRRDCFIQLVDEWGTSQTDARCMNRFQNQNKAARFKKCRCVPDARTLLPTKIVSKLGKTDLSIYRQLQRAMNEEALVGDERLFPKVKCYYKNWRLNLECSVIWHRDVVAAKNILLKGLWTLLGLPIPEAINRYWREAAEAAAAVAAAAAARATAEAAAAAVAIVDNDVEMFENDQQPADHAV

SEQ ID NO: 4214 - protein, 743 aa, Sitodiplosis mosellana
MGTTAYEYKAHIEHWLNGMPKGNKIHANWVVPMATAAIDQIFHEPKDMFWTGKIMDVLFRGIPVDCSNTEQFQAKAVCGLFESGEVKAVQKHNDTHFMFSLFQSGSIMGRKRMGAHAIRGNRSKPRKVEDGKQKEEKAYFAIKLAAASIVRPEYRDRILPWITKTSIKCTEISELASLLFLNKVRAATEQAIITGNWEYFDDGDGMHIIENCFYAVLRRYKEDNFIMDPWFRHCFENVDTENRSAWPNNDYFGNLMKYLFQQYGRNVKTNLDTHAQKRLRYFLRLKAFRQNYTNRIRGLPDTYDERDVANAVSWAIKRYECLCEICAKPVPFRVMNMVGNIHDGVSASILYTVKKTVVDKLVEDGLVRKRYSDGFYVYELGIDWGMKTWNATVRRRINNDKERIHNGKEMNFTINSKKYHYGTGEGVRKEKRERWTRAFGQFEESDRNNRARYDRMPSPKGSNWRDYIRHRMTIMKKAIAVYTTEKYTRLSFDHYIESNRVSDKVAAMLTNRKRCIINIGASQPPANSPIKIKKHVRCPGVRKLVKSFKKMEGNVIRFVNEARSSRLCARCFEPFPLSTLNDRVKVCEWCMPDQDDWPDGMKLPEKIVVAKSKRKLRSERRAMRQAAVQNPNQPRGFVSKVICYRKNWQQNAENGMDDNVEERRGVIIHDAELGIIEYTDEFVPEDPVDDSPVLKTVWQRDISAAKLILYRGHCELFGHRLHDAFTRQHLVYPTRFRVNFNIH

SEQ ID NO: 4215 - protein, 1049 aa, Sitodiplosis mosellana
MYEYIQKDWFESLWMWMGMQRIVEKFLIDTAHLREQWKAYDRDPVNNREPSVPKIPKVKNFAAIPLCDTKLKHIPFDHKDLIAIVGQLRNERGWDIRADYRTYYKQGENKDEAWGIVFDIDKIRRLRTGSKEFYHKIQTNSSAVSVLFSRPKRKGAGVTLEQIKAKYEKPVSKGGYKYESGIDPGQKTKMACVRRTLATGIETNIKLSSIQYHWGARQGMRDKQATKMTRKYVHKEQRDLKSYPITSVSPRGSQWKSFIKHKIKMLTDSLATYARRKYAQLSLHKYIESNREMDLMAKHITNNETGVVFLGDAAFPSNSKIGVKRTKRSPDQRKLIVSLKKNGKTDVVLTPEPYTSQTCANCLRRFPRSTKSDRFKVCKDCRPHKDVRLPPVIVTDRSRRRKQRDRKENASQKPTANVTRAEKAEKHREKRRSERESHNPEQLDTEQAVRRYNRRIRRRELRQRRRVAGHRSRKVTKQPEAESDLPVPTHNPNRLHIASTSVQQNDGIYKCHFGDEYQIEDVSGAVAKFTIRSVGINHVIFQSMDRKLACVRICYKTNGEKICDERSIQNSFVEVDSLTAATDYKFLLYQCGESKKLFFEGDIETEHDIPGSVSEHKVYKKNGGIALEWSAPTKPNGILDHYLIQWTIGNVTHSEEFRYQEREKNVFEFPGLQDTDRFNISICAVSNFGNGLPIYVDLRDVTDIPEEDEGMNAKNRDPRLGISIGVLLSVLCIIGCVLIIIRHRRCSKSPQHQHINGNGNNARGSFQNRSPLNRAPVAGTTMIVPNSSAQISANCAPDAHEMQTLIVTSSVENIPSTNGNGVAKKLDNHNMNGVVVRGNRNSFNNANVHSDDDDHADLMRCGLISSTPKLKHKTNNANNDHLKNTSTNHGSHTANPVDLPYRRIDCDLDALGAAEIAPNITLGNGSLHQMKTTLPPNKSVHSIVYNETEIPPTIIRTNDDKANHHPKHRTSTAHKSNVSIPSIFDDSQQSLLPDANATESSSASTSSGSVPMDRIANKTNCIFDVNTFDNGAPHPIIENQRYMRSAALV

SEQ ID NO: 4216 - protein, 1544 aa, Sitodiplosis mosellana
MVQTVYVEEDNSISQKQRPPKPKSRYKPSGTKPRGPRAELPRIDPEFKAIVEGLDDYHRIDWPNNKNFGNGLKHLTNQYTDNVVTNLETHANKHITQYLKLKVFQWNSDVGDDAEKFLPSDIASVVNLIIKQKDIKVPIRDPDKLVRCEVLYDIVRDCNVFPEIDLHDLTTDPKHWYKAMPMYLSMQREIEEYNSEWPHQRRPKRKKRKRKKTKGKWKRKRSQMLDNPDFRPLIRNLVVVPMCDFRRTHFRIDCTSMRQVLSSQKLLPKVEIENKKGTISTTIIPGKDFNRDRDYWWNQYFYMRKIRRFVRAKKQFDYSINTDGISVSLQYSAKKKTANKEIDQKSRIIQKIKDGTIKNYSGVDSGVRSWNTTTTHDIETGKETNFVMSSKQFHWQTGQKVRNAKAKRWTKNFVEMERADRENRDLYPVMPSPKGSMWLNYIKHRVKMMKHGICAYSTAKYTRLALDQHIKSSSVVDEWVNKVTDKKPTLFFFGADGEIPPDSPISIKKHVRCPGVRKTLRSIKKRRDCFIQLVDEWGTSQTDARCMNRFQNQNKAARFKRCRCIPDARTLLPTKIVSKLGKTDLSIYRQLQRAMNEEASEEDECLFPKVKCYYKNWQLNLECSVIWHRDVVAAKNILLKGLWTLLGLPIPEAINRYWREAAEAAAAVAAAAAARATAEAAAAAVAIVDNDVEMFEYDQQPADHASAKTFLEQAAQQNIAEFLKALSEVLANVSCSAVARTAAGLQLKNHLTSKDLTVTEQYHKRWLSFDEVTREYIKTNIIQAIGTETSRPSSAAQCVASVAVAEIPVNQWSQCIPTLVNKVVSEGTTERSRESALEAIGYICQDIAPGVLESQSNQILTAIIFGMRKVEPSNHVRLAATNALHNSLEFTKANFDKQAERNYIMEVVCESTQSPDSQISVAALQCLVKILTLYYQYMEPYMAQALFPITLEAMKSDNDQKLKKLVDHRLESQSSTARGALQYLVPVLMEKLTKQEEYDDEDDWNPSKAASVCLMILSSCCEEEIVPFVLPFVKENIKSPNWRFRDAALMSFGSILGGINEQTTKPLVEQAIPTLIELMYDESVTVRDTTAWVFGRVCELCPSAAINEAYLKPLLEALVRGLKAEPRVAANVCWAFTGLVEAAADTENIGEGMQETNCLSQYFEFIVSQLLETTDRQDCGQANLRAAAYEALMDMIKNAPNDCYPVVQKTTMVVLERLNHVLQMESQIQHTDRYQFNDLQSLLCATLQSVLRRVTPDDAPQISDAIMGALLTMFSTSAGKSGNVQEDALMAVSTLAELLGDKFLKYMDAFKPYLYMGLKNHQEHQVCVAAVGLTGDICRVLRNKIAPYCDEIMTLLLENLSLPNLHRNIKPQILSVFGDMALGIGTDFKKYLMIVLQMLQQASTLQVDTNDYEMVEYLNELRESVLEAYTGIIQGLKGTDRAPHPDIELLKNHVPHIIQYLVTIAQDPEMNDSIIAVMAGLVGDLCNAFGPALLAIIDNEHIGKLLQEGRKSRVSRTKQLSSWASKEIKKLREQPIQQIAASSW

SEQ ID NO: 4217 - protein, 1208 aa, Sitodiplosis mosellana
MEFKLKMVLVNPVAPDASWPELLKIKNLETQYKSMDLPIDPSDLSVTEHIYPDRLSYNPYPNFMEKQLNDALEDRAYGYARYNDLSPYQQYDNDLAADESKVSILRDAQCATNGKSCGENEACMQLDSKSLLGICRCNIGYIRNAYQKCVLEEPNLSYNPDNFNEKMMMIKHLTENREDPVDDSKAESGEVDPKIGHLSVSVVSKTVQLPDNKATLSAFPVPDEQTSGATYNYSWSLISQPSGDTNGTMSDKTKSEIELTNLSEGLYRFKVVVSGKNWKGETFANVTVLPEKRFNKAPIVVIKPATQIIKSPTSSAILDGSASTDDDQIKTWRWDLIQGPMNYAPLMTETSTLQLTNLTLPGNYTFKLTVTDSDNITNSTTANITVLKATDYPPSANAVTDGQGLSSSDTVSVIVYPDPLLKNLVEITFAAGVSVLTETEVQSLEQKLVLLLGNNMKLIVRDLRMEQKTGEAILIFYVEQVTGAKENQILTGFDVEVMLKDKLWSGSNIVGMPISDIRTTPPKPKSRYKPSGTKPRGPRAELPRIDPEFKAIVEGLDDYHRIDWPNNKDFCNGLKHLTNQYTDNVVTNLETHANKHITQYLKLKVFQWNSDVGDDAEKFLPSDIASVVNLIIKQKDIKVPIRDPDKLVRCEVLYDIVRDCNVFPEIDLHDLTTDPKHWYKAMPMYLSMQREIEEYNSEWPHQRRPKRKKRKRKKTKGKWKRKRSQMLDNPDFRPLIRNLVVVPMCDFRRTHFRIDCTSMRQVLSSQKLLPKVEIENKKGTISTTIIPGKDFNRDRDYWWNQYFYMRKIRRFVRAKKQFDYSINTDGISVSLQYSAKKKTANKEIDQKSRIIQKIKDGTIKNYSGVDSGVRSWNTTTTHDIETGKETNFVMSSKQFHWQTGQKVRNAKAKRWTKNFVEMERADRENRDLYPVMPSPKGSMWLNYIKHRVKMMKHGICAYSTAKYTRLALDQHIKSSSVVDEWVNKVTDKKPTLFFFGADGEIPPDSPISIKKHVRCPGVRKTLRSIKKRRDCFIQLVDEWGTSQTDARCMNRFQNQNKAARFKRCRCIPDARTLLPTKIVSKLGKTDLSIYRQLQRAMNEEASEEDECLFPKVKCYYKNWQLNLECSVIWHRDVVAAKNILLKGLWTLLGLPIPEAINRYWREAAEAAAAVAAAAAARATAEAAAAAVAIVDNDVEMFEYDQQPADHAV

SEQ ID NO: 4218 - protein, 607 aa, Sitodiplosis mosellana
MGAHAIRGNRSKPRKVEDGKQKEEKAYFAIKLAAASIVRPEYRDLRAATEQAIITGNWEYFDDGDGMHIIENCFYAVLRRYKEDDFIMDPWFRHCFENVDIENRSAWPNNDYFGNLMKYLFQQYGRNVKTNLDTHAQKRLRYFLRLKAFRQNYTNRIRGLPDTYDERDVANAVSWAIKRYDATRGDADRLAKRDRLLLYVRDIRGPADDDIAKFTKDEDRWFASLPMWLTMQSEIETHLNWVEQHHDNIVQVIALPNIKNLVVIPICHHTRKAMNFTINSKKYHYGTAEGVRKEKRERWTRAFGQFEESDRNNRARYDRMPSPKGSNWRDYIRHRLTIMKKAIAVYTTKKYTRLSFDHYIESNRVSDKVAAMLTNRKRCIINIGASQPAANSPIKIKKPVRCPGVRKLVKSFKKMEGNVIRFVNEARSSRLCARCFEPFPLSTLNDRVKVCEWCMPDQDDWPDGMKLPEKIVAAKSKRKLRSERRAMRQAAVQNPNQPRGFVSKVICYRKNWQQNAANGMDDNVEERRGVIIHDAELGIIEYTDEYVPEDPVDDSPVLKTVWQRDISAAKLILYRGHCELFGHRLHDAFTRQHLVYPTRFRVNFNIH

SEQ ID NO: 4219 - protein, 723 aa, Sitodiplosis mosellana
MGYQRKKAKKKGKPIAVLGDVIEEDEKEKDSGIRTVKTQLRAILRPEYRDLLIAAITDRSMMATKICALASQLFLFRCERAFEDNDKGFFEQNGEKLDDSHRVVWPNADYFGNGMNDLIDTYVTNVKNNLKTHSKKRLREWLRVKVFESSLVARYEQADIDRVISLAIFGNDDITINGMDDVAKRERRTLLIGMVTKNSWWDIPDNNIGRFTNGKDWFKSIAFWISLQRKIDDFNTCEEYREERRCQREEFEELKRCRRRNHRPCTCQQPVDRGLNGNEYIEKGPPRVKNLAVIPICSFTRTHFTLDIRTLYFLLRQLGIVPLNITEDEFRKQKEYYWDQYFDMRKIYHLGRSRKKFRFRILSNGQAVSLQFDIDKTKMSNMEPDKKAIVQNYKKFVNEGATDPGVNTWNATTVHNIATGKEGKRWTKDYIKEERQDRENRALYPVMPSPLGRHWEDYIRHRLKMTERGIAVYTTDKYTRLNFDKYVRANSVTDSIAGMLTNHQPTLMHFGAAQMSPSSPIGIKKTLRCPGNRKMIRSYKKCRGCVVNMVDEYYTSQTCAKCFGRFDRRTKRHRFKVCHDCRPQSVVRAMLPSMIVCKVNKRKMRQEKLKLFLLEKEAEEGNGNPAVGNDVPHPDQLNPELLPKVAIYHKIWHVNESSGILEYVKFNSAGEMEVVEPRLHKTTWHRDIAAAKCILIKGHCDLFGFKLPETLQRPSNQRAAVNN

SEQ ID NO: 4220 - protein, 718 aa, Sitodiplosis mosellana
VENNDFALFGGSGEDKIKLCFEQVLWHNNQPPKPKSTYKPSGTKPRGPRAELPRIDPEFKAIVEGLDDYHRIDWPNNKDFCNGLKHLTNQYTDNVVTNLETHANKHITQYLKLKVFQWNSDVGDDAEKFLPSDIASVVNLIIKQKDIKVPIRDPNKLERCSVLYDMVNDLNVFPEIDLHDLTTDPKHWFKAMPMYLSVQREIEEYNSEWPHQRRPKRKKRKRKKTKGKWKRKRSQMLDNPDFQPLIRNLVVVPMCDFRRTHFKIDCSSMHQVLSSQKLLPKVEIENKKGTTSTKTIQQKDFNHSRDYWWNQYFYMRKIRRFVRAKKQFDYSINTDGISVSLQYSAKKKTDNKEIDQKSRIIQKIEDGTIKNYSGVDSGVRSWNTTTTHDIETGKETNFVMSSKQFHWQTGQKVRNAKAKRWTKNFVEMERADRENRDLYPVMPSPKGSMWLNYIKHRVKMMKHGICAYSTAKYTRLALDKHIKSSSVVDEWVNKVTDKKPTLFFFGADGEIPPDSPISIKKHVRCPGVRKTLRSIKKRRDCFIQLVDEWGTSQTDARCMNRFQNQNKAARFKKCRCVPDARTLLPTKIVSKLGKTDLSIYRQLQRAMNEEALVGDERLFPKVKCYYKNWRLNLECSVIWHRDVVAAKNILLKGLWTLLGLPIPEAINRYWREAAEAAAAVAAAAAARATAEAAAAAVAIVDNDVEMFENDQQPADHAV

SEQ ID NO: 4221 - protein, 489 aa, Sitodiplosis mosellana
MYEYIQKDWFESLWMWIGMQRIVEKFSIDTAHLRQQWKAYDRDPVNNREPSVPKIPKVKNFAAIPLSDTKLKHIPFDHNDLIVIIGQLRNERGWDIRADYRTYYKQGENKDEAWGIVFDMDKIRQLRTGSKEFYHKIQTNSSAVSVLFSRPKRKGAGVTMEQIKAKYEKPVSKGGYMYESGIDPGQKTKMACVRRTLATGTETNIKLSSIQYHWGARQGMRNKQATKMTRKYVHKEQRDLKSYPITSVSPRGSQWKSFIKHKIKMLTDSLATYARRKYAQLSLHKYIESNCEMDLMAKHITNNETGVVFLGDAAFPSNSKIGVKRTKRSPDQRKFIVSLKKNGKTDVVLTPEPYTSQTCANCLRRFPRSTKSDRFKVCKDCRPHKDVRLPPVIVTDRSRRRKQNDRKQNASKKPTANVTRAEKAEKHREKRRSERESHNPEQLDTEQAVRRYNRRIRRRELRQRRRVAGHRSRKVTKQPEAESDLPGFD

SEQ ID NO: 4222 - protein, 558 aa, Sitodiplosis mosellana
MYEYIQKDWFESLWMWMGMQRIVEKFLIDTAHLRQQWKAYDRDPVNNREPSVPKMPKVKNFAAIPLSDTELKHIPFDHIDLIDIICQLRKERGWNIRADYRTYYKQGENKDEAWGIVFDMDKIRRLRTGSKDFYHKIQTNSSAVSVLFSRPKRKGAGVTLEQIKAKYEKPVSKGGYMYESGIDPGQKTKMACVRRTLATGTETNIKLSSIQYHWGARQGMRDKQAKKMTSKYVHKEQRDLKSYPIASVSPRGSQWKSFIKHKIKMLTDSLATYARRKYAQLSLHKYIESNREMDLMAKHITKNETGVVFLGDAAFPSNSKIGVKRTKRTPDQRKFIVSLKKDGKTDVVPTPEPYTSQTCANCLRRFPRSTKSDRFKVCKDCRPHKDVRLPPVIVTDRSRRRKQRDRKENASQKPTANVTRAERAGKHREKRRSERESHNPEQLDTEQAVRRYNRRIRRRELRQRRRVAGHRSRKVTKQPEAESDLPDYDDDELVSQCFEFYESVITENNLITTFVMQKLAEHPEIQERLYDEMVEIESRLDGNELSYDGLNTMKYTEM

SEQ ID NO: 4223 - protein, 764 aa, Sitodiplosis mosellana
LDPANYYTAPGLSWDAMLKYTGVRIELLSDVEMLLFIERGIRGGISVENNDFALFGGSGEDKIKLCFEQVLWHNNQPPKPKSTYKPRGEKPRGPRAELPRIDPEFKAIVEGLDDYHRIDWPNNKDFCNGLKHLTNQYTDNVVTNLKTHANKHITQYLVLKVFELNSNLEEDGEKFLPSDIENVVKLIIKQKDIKVPIRDPDKLVRCEVLYDIVRDCNVFPEIDLHDLTTDPKHWYKAMPMYLSMQREIEEYHAMWPHQHRSKRKKRKRKKKKGKWKRKRRQMLDNPDFRPLIRNLVVVPMCDFRRTHFKIDCSSMHQVLSSQKLLPKVEIENKKGTTSTKTIQQKDFNHSRDYWWNQYFYMRKIRRFVRAKKQFDYSINTDGISVSLQYSAKKKTANKEIDQKSRIIQKIEDGTIKNYSGVDTGVRSWNTTTTHDIETGKETNFVMSSKQFHWQTGQKVRNAKAKRWTKNFVEMERADRENRDLYPVMPSPKGSMWLNYIKHRVKMMKHGICAYSTAKYTRLALDKHIKSSSVVDEWVNKVTDKKPTLFFFGADGEIPPDSPISIKKHVRCPGVRKTLRSIKKRRDCFIQLVDEWGTSQTDARCMNRFQNQNKAARFKKCRCVPDARTLLPTKIVSKLGKTDLSIYRQLQRAMNEEALVGDERLFPKVKCYYKNWRLNLECSVIWHRDVVAAKNILLKGLWTLLGLPIPEAINRYWREAAEAAAAVAAAAAARATAEAAAAAVAIVDNDVEMFENDQQPADHAV

SEQ ID NO: 4224 - protein, 268 aa, Sitodiplosis mosellana
MDEIIKLVKNKKEFGDSIISDGVSASVLFKLLKQSKTLTDEEEVETKRKYFANEFAYALEIDPGMRTFIASVRLDLQTGEETNEKISFKQYHQKSKQDARNIKAERMTRVFAYDEQADLKRIAAEIGQTPSPRNISWRHYIEHRLRMSQDGIAAYSQKNYARLRLDKHIEWRRAIDLIAGKLVHFKTAIIKRVLQMQRKIMRTWEEMRDQGDAIAAILTQRNSGRLVSKKQRFFKSWQPNAAGTEDAAQSRKLLKSLWHRDISAAKLI

SEQ ID NO: 4225 - protein, 455 aa, Sitodiplosis mosellana
MSLRRGLKTDKNEKAKKDVNAEVTRLIENCVLEMTRCIIFAALNIHCFLSHFVATESDEAVAAFSCQIIDKNFFLDFYRGVQFVGSGTDGGFKLYAPLSDMCRRYNVIAPNLTGFGNIVQYAFQMYFTNFKNNMWMHAYKRMKKYCKVYQQDKKIITDTLHYLFYEKFGDGKGYFMNMKEGNSKWFKYVPLFMRLQQFIRENNRQRRAEIRRGERPTHRKIKNFTVIPSSPFKRHYIRIDRDAFHCLLKVERTPKNEHCAQVQFDNAIITDGVAACFQMLRTKVVYETDEEERLKDIQQKLRSAQQVYGIDPSLRLVLGGVRRNYDARKKRRVLTRQIDEQMKSYRERFDDRPGPRSTDYNVYADHILRHFNAKFDAYTQCEYALQDLLQYIATERELDKLASQLINGKQTFVFAGDATLPGSSSLAKGVDCVEVFYQWFKNFEILEISIFGPSV

SEQ ID NO: 4226 - protein, 801 aa, Sitodiplosis mosellana
MGDNLYTLWCKEPAPNHDLYVEICSTEYGRSTNDKTMKKNNVTAKKLRDKGNELYSKKKYHDAMAYYNQSISYAENNSEALALAYANRSTCFLNLNLFQECLIDIERARIGYPSSQMSKLDNREQKCMDLMNKIGNESHVREPELSFNENGMHPGVADCLKIEKNSKFGRHVVTTRDLEIAQTILVEMPFAFKNEPIKPDHSMQYDPFVDKSRIIQHDRSGDNTFGRCMYCYVECTNLIPCENCAGVLFCDEVCMKKAYHKNDCQMADSSRKETLGMVLRMLYRTNDAFPCVNELMTTVRLLLDGNNVNWHQNDDQRNFSLIFQLPTHSGHQWSRNLKLTRTVTEVIYNKVMRLPDFKGKFTSSTHRRFLQHLILHLFHVAEHAINASEYWRESDDQNLGSFDVRTFGNGMYPFGCYINHSCTPNVCWYFVDHRLICRVIRPIRKNQQLFGFYFPSTLCEHIPHQNRGLLLEYHYFFKCKCKLCLNPNWSIFTGKDLSEGPLYEKAIEPTWMDLDEIRKLTTEELVSYEREAAKFLAKYDPKTDGVVLNLLFRRPQQESVDHHDRIQAEFDAGEIRNLVAIDAGTMLVITFKRIEPMHGFRETNSYLSNKRYQALQESQKHNAEIAKESAEYLKLDNSLRAGCKKEFGEVASSRSRNFHLHTFHRMHTFNLGMGTRVEPKDIARRDFEYYRKRQSIAARVANEIANGEKTLLALSPTTPIYVKSPIRGYIRAPLKLLDHSLQNHPLITVVDQRENYSTQICSYGFKQLVIPRQKGSFNAVTAIDLQIKSCCRRRNTEESKC

SEQ ID NO: 4227 - protein, 755 aa, Sitodiplosis mosellana
MELRQFDVKTAFLNGDLSEEIYMEQPAGFTDGTNRVCVENNDFALFGGSGEDKIKLCFEQVLWHNNQPPKPKSTYKPRGEKPRGPRAELPRIDPEFKAIVEGLDDYHRIDWPNNKDFCNGLKHLTNQYTDNVVTNLKTHANKHITQYLVLKVFELNSNLEEDGEKFLPSDIENVVKLIIKQKDIKVPIRDPDKLVRCEVLYDIVRDCNVFPEIDLHDLTTDPKHWYKAMPMYLSMQREIEEYHAMWPHQHRSKRKKRKRKKKKGKWKRKRRQMLDNPDFRPLIRNLVVVPMCDFRRTHFKIDCTSMRQVLSSQKLLPKVEIENKKGTTSTTIIPEKDFNRDRDYWWNQYFYMRKIRRFVRAKKQFDFSINTDGISVSLQYSAKKKTVNKEIDQKSHIIRKIKDGTIKNYSGVDSGVRSWNTTTTHDIETGKETNFVMSSKQFHWQTGQKVRNAKAKRWTKNFVEMERADRENRDLYPVMPSPKGSMWLNYIKHRVKMMKHGICAYSTAKYTRLALDKHIKSSSVVDEWVNKVTDKKPTLFFFGADGEIPPDSRISIKKHVRCPGVRLTLRSIKKRRNCFIQLVDEWGTSQTDARRMHRFENQNKAARFKKCRCIPDARTLLPTKIVSKLGKTDLSIYRQLQRAMNEEASEEDECLFPKVKCYYKNWRLNLECSVIWHRDVVAAKNILLKGLWTLLGLPIPEAINRYWRKAAEAAAVVAAAAAARATAEAAAAAVAIVDNDVEMFEYDQQPADHAV

SEQ ID NO: 4228 - protein, 290 aa, Sitodiplosis mosellana
MHRRNNDKEQQQQQQRSVNIKAGTKPKAVDDDDDDDAAAAAAAKKEKENRRKKLQECDREVVLDVGKRLMICGVIIDHTTGDYRHLKFSSHEYDRMCKKQVFKKPREAITNQIDDEMKKDREAIAKTSSANNLQPSSRSPDFETYARHTLKYFTRAMAAYGSKEFAKIDYDAWAQTRSTLVYIARMIVGRSKYVVVIVGDKLPEANSLGFGYSTTKVHGLFKLLDEHPQCTVYYGSEHRTSKCCCRCGQVLLDARMGESRSLENLLEGGSSTAGSSQTNGKESHQSLFDV

SEQ ID NO: 4229 - protein, 1460 aa, Sitodiplosis mosellana
MLPMKHFDEIEKEALEMLRSSTDSSDSNAKKVVDIKENAIDKNEKSLSDDEYDDEYDYTNDDIDSDSDEIVSITPKPVTVSTTRKASKTTKIVVNTSSKPEVVATEKAKPSTPNPKLKYISDVDSGIDDDYNDNDEDDDDDDDDEDEDTDDPITSNEPVVCPRDCICSRNMNGFMVATCSRLDAGIQNFSAGITDLEVVNVSPQYPIVLGASFFKLVGLEHVSSIKIVNSFIANIHPKAFEGLVELYSVNLTNSGITILHPDTFAENAKLRLLSLDANDLSQMQQNQAPFNDYMLKAPSVEELSLSRCNLKKLLPTAFDRLENTIFINLANNDLQSLPPNLFDKVTNIEELDLSSNKISTLPKNIFAKTSLAILNLKYNQIESKLDFATSEIQKLDLSYNNISNVGNMMFNELTGLTTLLLKGNGIKKIHQTSFFPLKNLRQIDLSYNDLEQVSSTLFLVNKELDVIRLNDNYRLKSLPLEGFACESGKFNVYLFDLQNCDISELGDDTFKNMPRMTTLNLAWNNIETLTREFFKSMTKLIELNLSNNVISELENLTFLNNRNLKKLNLAGNQLQKISPRMFLPLKDLTELDLSSCDLVEIWSEQISANLPTSTVLKNLKLLNVSNNNIIHARHSHFSSMEKLEVLDLSNNHLHCDDGFKNLIQWLKDRKIKAGNIHAGFNAELTENGHAVDSSASYSLGWESFATNVCAAHQSTNVDSKATAKTDEYADESVDNSDSDDEDDEEEDDTDESTQATKESASGNTEAEDLDSDEEEYDDDNDNEIEINSGNELRDKDKIIAEEIDGLNDRIIDHCFNCVTSNNIKDPLTAQMPDAFLAMVTQGSPNFEWPRRHQMTRQVYALKDQYVANVKTNLETHCWEVSQLCGPSFVKCFTMYEYIQKDWFKSLWMWIGIQRIVEKFSIDTAHLREQWKAYDRDPVNNREPSVPKIPNVENFAAIPLSDTKLKHIPFDHNDLIDIIGQLRNERGWDIRADYRTYYKQGENKDEAWGIVFDMDKIRQLRTGSKEFYHKIQTNSSAVSVLFSRPKRKGAGVTLSEIKAKYEKPVSKGGYKYESGIDPGQKTKTACVRRTLATGIETNIKLSSIQYHWGARQGMRDKQATKMTRKYVHKEQRDLKSYPITSVSPRGSQWKSFIKHKIKMLTDSLATYARRKYAQLSLHKYIESNREMDLMAKHITNNETGVVFLGDAAFPSNSKIGVKRTKRSPDQRKFIVSLKKNGKTDVVLTPEPYTSQTCANCLRRFPRSTKSDRFKVCKDCRPHKDVRLPPVIVTDRSRRRKQRDRKQNASQKPTANVTRAEKAEKHREKRRSERESHNPEQLDTEEAVRRYNRRIRRRELRQRRRVAGHRSRKVTKQPEAESDLPGFVKIGDTSICKIRVKNRKAKPQLWQRIHYDATDKGIGLLGSKKIAFQKNWHSSPMNDQNAFTATWHRDICAAKCILYRGM

SEQ ID NO: 4230 - protein, 772 aa, Sitodiplosis mosellana
MGRKRIGAHAIRGNRPKPRKVEDGKQKEEKAYFAIKLAAASIVRPEYRDRVLPWITKTSIKCTEISELASLLFLNKVRVATEEAIITGNWEYFDDGDGMHIIENCFYAVLRRYKEDDFIMDPWFRHCFENVDTENRSAWPNNDYFGNLMKYLFQQYGRNVKTNLDTHAQKRLRYFLRLKAFRQNYTNRTNGLPNTYDERDVANAVSWAMKRYDATRGDADRLAKRDRLLLYVRDIRGPADDDIAKFTKYDDTWFASLPMWLIMQSEIETHLNWVEQHHDNIVQVIALPNIKNLVVIPICHHTRKAVRIDADVLYRMMCETGTIPRDEYGRQHTVGHVTSKSNQAYYFNMIFNMEKINRLLKANKKFEHILSDGVSASILYTVKKTVVDKLVEDGLVRKRYSDGFYVYELGIDWGMKTWNATVRRRINNDKERIHNGKEMNFTINSKKYHYGTGEGVRKEKRERWTRAFGQFEENDRNNRARYDRMPSPKGSNWRDYIRHRFTIMKKVIAVYTTEKYTRLSFDHYIESNRVSDKVAAMLTNRKRCIINIGASQPPANSPIQIKKHVRCPGVRKLVKSFKKMEGNVIRFVNEARSSRLCARCFEPFPLSTLNDRVKVCEWCIPDQDDWPDGMKLPEKIVAAKSKRKLRSERRAMRKTAVQNPNQPRGFVSKVICYHKNWQQNAANGMDDNVEERRGVIIHDAELDIIEYTDEYVPEDPVDDSPVLKKVWQRDISAAKLILYRGHCELFGHRLHDAFTRQHLVYPTRFRVNFNIH

SEQ ID NO: 4231 - protein, 663 aa, Sitodiplosis mosellana
MKRKRAQNGRPRSVKLSLNSVLRDQYRANFVAQVTNWCHTATVITVLASLLFLFENNRAFDEDNHDFFRGNGYELIKDCFKNILNENRHKLPLAFRQIIETAVPNFRWPQREGMHNAFNQLIDQYTTNVKNNIKTYSYTRIKTFFVLQRYELNLLGHNISDIDVKNATKAVMFNNIVPSANVERLLEQARMIGIPVGTKLCDLVRGSWFQTIPIFITIQRLVFNRHERYELLNDLWRRYYRDRLHNAMPSIARPPKIKNFRVIPIHDFKMKHIRIDIHLFYQMACKLGAIKLAKGLFGQPVNISKKVYDSNPLVSWDTIFNMDKIQKVGNRKTFDYTIVTDSVAVSLCFLKPECPSHEYSHEQINEMYENGVFRFVLGMDPGVRTWNATVRKHIASGVEPGMEVYTARKYIRLNLDKHIEETRASDTIAAFLTRKLPSLIFLGAAQMAPNSPIGIKKRLRCPGVRKLLNSFKKLHNCVVVMVDEFKTSQTCAKCFRPFDRRTKKDRYKVCRQCIPHAANITTDKHLSSVIISNKSNRLYQREQRHVVAEYERLNVHPVYSHGLVPKLNVWFKNWQLNTDNTWNDSRHPHQQNTVWHRDEVAAKCILYKGLCMIKGLDVHPQLSRQHHAAAAAAHNNAEGDQDDNDSDSDDDYVYVLDDVSDEE

SEQ ID NO: 4232 - protein, 633 aa, Sitodiplosis mosellana
MLFGLLLIETNKSGAAPATVITVLASLFFLFENNRAFDEDNHDFFRGNGYELIKDCFKNILNENRHKLPLAFRQIIEAAVPNFRWPQREGIQNAFNVPINQYTTNVKNNIKTYSYTRIKTFFVLQRYELNLLGHNISDIDVKNATKAVMFNNIVPSANVQRLLEQARMIGIPVGTKLCDLVRGSWFQTIPIFITIQRLVFNRHERYELLNDLWRRYHRDRLHNAIPSIARPPRIKNVRVVPIHDFQMKHIRIDIHLFYQIACKLGVIKLAKGLFGQPVNISKKVYVSNPFVSWDTKFNMDKIKKVGNGKTFDYAIATDSVAVSLCFLKPECPSHEYSHEQINEMYENDVFRFVLTMDPGVRTWNATVRKHIASGVEENITIDDPKYHFRAKYGKRKRKSEKWLRLFTELEQHDRNQYPFYPSPKGASNWMSYIEHRVKMLQPGMEVYTARKYIRLNLDKHIEETRASDTIAAFLTRKLPSLIFLGAAQMAPNSPIGIKKRLRCPGVRKLLNSFKKLNNCVVVMVDEFKTSQTAETQCMVQKLAAKHWQLTHGTIHVIHINRTLFGIGMKSLPSAYCTKVFCMIKGLDVHPQLSRQHHAAAAAAHNNAQGDQDDNDSDSDDDYVYVLDDVSDEE

SEQ ID NO: 4233 - protein, 596 aa, Sitodiplosis mosellana
MVLTEVLALGNGYELIKDCFKNILNENRHKLPLAFRQIIETAVPNFRWPQREGIQNAFNAPINQYTTNVKNNIKTYSYTRIKTFFVLQRYELNLLGHNISDIDVKNATKAVMFNNIVPSANVQRLLEQARMIGIPVGTKLCDLVRGSWFQTIPIFITIQRLVFNRHERYELLNDLWRRYHRDRLHNAIPSIARPPRIKNVRVVPIHDFQMKHIRIDIHLFYQIACKLGVIKLAKGLFGQPVNISKKVYVSNPFVSWDTKFNMDKIKKVGNGKTFDYAIATDSVAVSLCFLKPECPSHEYSHEQINEMYENDVFRFVLTMDPGVRTWNATVRKHIASGVEENITIDDPKYHFRAKYGKRKRKSEKWLRLFTELEQHDRNQYPFYPSPKGASNWMSYIEHRVKMLQPGMEVYTARKYIRLNLDKHIEETRASDTIAAFLTRKLPSLIFLGAAQMAPNSPIGIKKRLRCPGVRKLLNSFKKLNNCVVVMVDEFKTSQTAETQCMVQKLAAKHWQLTHGTIHVIHINRTLFGIGMKSLPSAYCTKVFCMIKGLDVHPQLSRQHHAAAAAAHNNAQGDQDDNDSDSDDDYVYVLDDVSDEE

SEQ ID NO: 4234 - protein, 767 aa, Sitodiplosis mosellana
MTQIEVPDLPIKLKHKDEAESQEALSQWMDYIKRATLKGGTSNIDPMLVDRIENKDLFSETDSSEDESELANGDTLQPILFRKAILGSGKMGYQRKKTRKKPKPIAVLEDVIKEDNEKEENEKDSGIRTIKTQLRSILQPEYRDFLIAAITDRSMMATKICALASQLFLFRCERAFDDNDKAFFENNGEKVIRSCFYGVLKKNIYKKKKMPPEFRKMVHQLDDSHRVTHSKKRLREWLRVKVFESSLVARYEQAYIDRVISLAIFGNDDIEINGMDDVAKRERRNLLIEMVTKNSWWDIPDNNIGLFTNGKNWFKSIAFWISLQREIDDFNTCEEYREERRCQREEFQELKRCRSRNHRPWTCQQPVDRGQNGNEYIEKGPPRVKNLAVIPICSFTRTHFTLDNKTLYYLLRQLEIVPLNITEDEFRKQKEYYWGQYFDMRKIYHLGRSRKKFRFRILSNGQAVSLQFDIDKTKLKPVDKKAIAQNYKEFVNEGGTDPGVNTWNATTVHNIETGKEGKRWTKDFVKEERQDRESRALYPVMPSPLVRSSKLVTDSIAGMLTNHQPSLMHFGAAQMSPSSPIGIKKTLRCPGNRKMIRSYKKCPGCVVNMVDEYYTSQTCAKCFGRFDRRTTRHRFKVCHDCRPVEGAMLPSMIVCKVNKRKMRQEKLQNMAINMFVKSEFVIEDYSQIVDRGTLKQWKVINEVNWDRWEAISDLHYFCYSSMIKDIVDEMDDVFISLFADDVKIAKIIHGCWSDTTGHRQTEGLVRR

SEQ ID NO: 4235 - protein, 460 aa, Sitodiplosis mosellana
MRCYELNHMCLCGDLELDELFDGDDIKNAINYTYNRRDSTRGNANAIRKLEILLAELYWIGAPYRPDDPHPFNIREFVELNWFQALRMFVNIQRDIHNFHLSFANLRQSWNLFRKYPLYVQEPEFLEPPEIITVIPKCTFQRRHVKIDTDSLHNILCGIKAMKREDGLRVNKKGEVLQRYISPNEFKRIGSWRSYFNMDDINKLVKNKKEFGDSIISDGVSASVLFKLPKQSKTFADEEEAETKRKYFANEFAYALGIDPGMRTFIASVRLDLKTGEERLARHHRHGTSLGAITSNIACECHIEWRGAIDLIAGKLVHFKTAIINIGAAEISPNCPIRIKKYVRCPGVRKLIPAFKRRGNCVVRLVYEYMTSQHCARCFKRFPTWTKSKRYKKCNDCQPDGRVGLPRTIYTNVSKRVLQMQRKIMRTWEEMRDQGYAIAAILTQRNSGRLVSKKQRFFKS

SEQ ID NO: 4236 - protein, 348 aa, Sitodiplosis mosellana
MDEINKLVKNKKEFGDSIISDGVSASVLFRLPKQSKTVVDEDEAETKRKYFANEFVYALGIDPGMRSFIASVRLDLKTGEEVGSGGTNEKISFKQYHQKSKQDARNIKAERMTRVFTYDEQADLKRIAAESGQTPSPRSISWCQYIEHRLRMSQDGIAAYSQKNYARLRLYKHINVGAAEISPNCPIRIKKYVRCPGVRKLIPAFKRRGNCVVRLVDEYMTSQHCARCFKRFPIWTKSKRYKKCNDCQPDGRVGLPRTIYTNVSKRVLQMQRKIMRTWEEMRDQGYAIAAILTQRNSGRLVSKKQRFFKSWQPNAAENAGTEDAAQSRKLLKSLWHRDISAAKLIVYK

SEQ ID NO: 4237 - protein, 707 aa, Sitodiplosis mosellana
MDETWIHHYTPESSQQAKEWMKLGSPPAKRPKTQQWAGKVYYTISSKQYHYWTKQKVRNRQGKRWTKDLIKEERRDRENRALYPVMPSPLGRHWKDYIRHRLKMTERGIAVYTTDKYTRLNFDKYVRSNSVTDSIAGMLINHQPSLMRFGAAQKSPSSPIGIKMTLRCPGNRKMLRSYKNALAVWDRRTKRHRFKVVQAMLPSMIVCKVNKRKMRQEKLKVFLLEKEAEEGNGNPAVGNDQLNPDLLPNVAIYYKTWQVNGTSGILEYVNVNRADDMEVVEPRAHKTTWHRDIAAAKCTLIKERLLDLFFTNDFTDITIERVDKANALKKKVECHHPPIMATFEWHGINTTEANITTKAFNFKRANYRDMNAHLANVNFTELFHGKTITEKVNLLHKTLDDAIIKFVPTYIVKSIQKCPWKNQFLITLKNKKNKVWKRYRRSGYHQSFEWKYILASREFDKLNTELYNTYVDKMKSSLKHYASRFWQYVNSKKSTDNKPKVMQLGDVRTANESERANLFANFFSSNYDNSTTQGVQQSPADDSQQTEEFQLDINFVLQELQALNTKKGTGPDGMHPLILKNCASRLAAPLEAPLTEIFNESLSTGHFPDKWKPSSVSPIFKKGARSTIETYRCIAKLQTVAKFFEHLVNVKLLSLVQDKITKKQHGFMKSRSTASNLTEFTYYAQRGINSGAQVDVLYTDFSKTVIP

SEQ ID NO: 4238 - protein, 714 aa, Sitodiplosis mosellana
MPKRKGTPLRGNQRKKKKIVSKTGIEGEIGILAIKMTLKAIVRPQYYQQVKDWFTQKSIECTKICALASLLFLYKVKSANESNNADFFSGDGNKEIKDCFYAVLQKNKEKEEMVPDFRDFVENMEAENRFSWPGNSFFGNQMQYLYKQYTTNLRNNLEMHAERRLYQYLIMRAWQFNAVSTGPTLRNDDIKRAVQWTIDRYDPIKTTDRHWEVKWEKRQLLLDMIAEIGGPEDNDVAIYTTSEGTWFKSINMWLTMQMEVDNFHIWAEENGIEIPKIKNLKVIPIHQFMRQHVKMETDVLIRMMSEMRFRLHGLIIKYEIVEDPMTQCWDEIFDMPKIHRLLKSNKRFRPYIASNGQAVSIMYEVPKSHLDRLVDDEIVRKRYRDGVYVYEIGIDPGMRTWNATVRRNIKTGKEINFTVSSKRYHYLARQGVRDRKAKRWTRRFVAEEQHDRERYQRMPSPKGENWGSYIAHRLTMLKKGIETYTTEKYAHLQFDKYIQSNRATDKIANLLTNRKPSIIHMGAVDMPANSPIRIKKHVRCPGNRKLAKSFRKIPNTVVRQVNENRTSQLCGRCFTPFDIATQRDRMKVCEWCLPDNDDWPPNLQLPTKIVSKKSKRTLIADRQRMREAVEQDPNQAERFVSKVISYQKNWQQSAAIDEDADPAEQEDAAESHDRRILKTCWHRDITAAKLILYKGHCHLFGIQLHFMFTIERIR

SEQ ID NO: 4239 - protein, 457 aa, Sitodiplosis mosellana
MSNMESDKKAIVQNYKKFVNEGGTDPGMNTWNATTVHNIETGKETNYTISSKQYHYWTKQKVRNRQGNRWTKDFVKEERRDRKNRALYPVMPSPLGRHWKDYIQHRLKRTERGIAAYTTDKYTRPNLDKFDQTVSPIGIKKTLRCPGNRKMIRSYKKCPGCVVNMVDEYFTSRTCAKCFGRFDRRTKRHRFKVCHDCRPQPERAMLPSMIMCKVNKRKMREEKLKVFLLEKEAEEGNGNPAVGNDVPHPDQLNPDLLPNVAIYYKTWQVNGSSGILEYVNVNRADEMEVVEPRAHKTTWHRDIAAAKCTLIKVAELRMLKILGVDCVGMSTVHEVITARHCDMKAFAFSIITNKCVTEYESNEEPGHEEVVEVGKSRQYLLASLSILGPVHFASDVHFSVRSKSWYLNLISHRLSDLVNSLVMLNHYLKCLMVMEALAVPGAMGLFPEEKVFVELRF

SEQ ID NO: 4240 - protein, 357 aa, Sitodiplosis mosellana
MDEIVKLVKNKKEFGDSIISDGVSASVLFKLPKQSKTVADEEEAETKCKYFANEFAYALEIDPGMRTFIASVRLDLKTGEETNEKISFKQYHQKSKQDARNIKAERMTRVFTYDEQADLKRIAAEIGQTPSPRNISWRHYIEHRLRMSQDCIAAYSQKNYARLRLDKHIEWRRAIDLIAGKLVHFKTAIINIGAAEISPNCPIRIKKYVRCPGICKLIAAFKRRGNCVVRLVDEYMTSQHCARCFKRFPIWTKSKRYKKCNDCQPDERVGLPRTIYTNVSKRVLQMQWKIMRTWEEMRDQGDAIAAILTQRNSGRQRSNASSKPGNQMLLKTLEQKTLHNHASCSNHFGIGTYQQPN

SEQ ID NO: 4241 - protein, 768 aa, Sitodiplosis mosellana
MGAHAIRGNRSKSRKVEDGKQKEEKAYFAIKLAAASIVRPEYRDRILPWITKTSIKCTEISELASLLFLNKVRAATEQAIITGNWEYFDDGDGMHIIENCFYAVLRRYKEDDFIMDPWFRHCFENVDIENRSAWPNNDYFGNLMKYLFQQYGRNVKTNLDTHAQKRLRYFLRLKAFRQNYTNRIRGLPDTYDERDVANAVSWAIKRYDATRGDADRLAKRDRLLLYVRDIRGPADDDIAKFTKDEDTWFASLPMWLTMQSEIETHLNWVEQHHDNIVQVIALPNIKNLVVIPICHHTRKAVRIDADVLYRMMCGTGTIPRDEYGRQHSGSDVTSKSNQAYYFNMIFNMEKINRVLKANKKFEHILSDGVSASILYTVKKTVVDKLVEDGLVRKRYSDGFYVYELGIDWGMKTWNATVRRRINNDKERIHNGKEMNFTINSKKYHYGTAEGVRKEKRERWTRAFGQFEESDRNNRARYDRMPSPKGSNWRDYIRHRLTIMKKAIAVYTTKKYTRLSFDHYIESNRVSDKVAAMLTNRKRCIINIGASQPPANSPIQIKKHVRCPGVRKLVKSFKKMEGNVIRFVNEARSSRLCARCFEPFPLSTLNDRVKVCVWCEPDQNDWPDGMKLPEKIVAAKSKRKLRSERRAMRQAAVQNPNQPRGFVSKVICYRKNWQQNAANGMDDNVEERRGVIIHDAELGIIEYTDEYVPEDPVDDSPVLKTVWQRDISAAKLILYRGHCELFGHRLHDAFTRQHLVYPTWIRHANINIH

SEQ ID NO: 4242 - protein, 401 aa, Sitodiplosis mosellana
MRKIYHLGRSRKKFRFRILSNGQAVSLQFDIDKTKMSNMEPDKKAIVQNYKKFVNEGATDPGVNTWNATTVHNIATGKEANYTISSKQYHYWTKQTVRNRQGKRWTKDFVKEERQDRENRALYPVMPSPLGRHWEDYIRHRLKMTERGIAVYTTDKYTRLNFDKFVRSNSVTDSIAGMLTNHQPTLMHFGAAQMSPSSPIGIKKSLRCPGNRKMIRSYKKCRGCVVNMVDEYYTSQTCAKCFGRFDRRTKRHRFKVCHDCRPQLVRAMLPSMIVCKVNKRKMRQEKLKLFLLEKEAEEGNGNPAVGNDVPHPDQLNPELLPKVAIYHKIWHVNESSGILEYVKFNSAGKMEVVEPRVHKTTWHRDIAAAKCILIKGHCDLFGDELPETLQRPSNQRAAVNN

SEQ ID NO: 4243 - protein, 668 aa, Sitodiplosis mosellana
MYEPRQDRAIANGCFGAHAIRGNRPKPQKVEDGKQKEEKAYFAIKLAAASIVRPEYRDRVLPWITKTSIKCTEISELASLLFLNKVRVATEQAIITGNWEYFDDGDGMHIIENCFYAVLRRYKEDNFIMDPWFRHCFENVDTENRSAWPNNDYFGNLMKYLFQQYGRNVKTNLDTHAQKRLRYFLRLNAFRQNYTNRANGLPDTYDEGDIKNAVSWAMKRYDATSGDADRLAKRDRLLLYVRDIRGPADDDIAKFTKDENTWFASLPMWLIMQSEIETHLNWVEQHHDNIVQVIALPKIKNLVVIPICHHTRKAVRIDADVLYRMMCETGTVPRDEYGRQHTVGHVTSKSNQAYYFNMIFKMEKINRVLKANKKFEHILSDGVSASILYTVKKTVVDKLVEDGLVRKRYSDGFYVYELGIDWGMKTWNATVRRRINNDKEMNFTINSKKYHYCTGDGVRKKKRERWTRAFGQFEESDRNNRARYDRMPSPKGSNWRDYIRHRFTIMKKAIAVYTTKKYTRLSFDHYIESNRVSDKVAAMLTNRKRCIINIGASQPPANSPIQIKKHVRCPGVRKLVKSFKKMEGNVIRFVNEARSLRLCARCFEPFPLSTLNDRVKVCEWCMPDQDDWPDGMKLPEKMVAAKSKRKLRSERRAESSSAESKSTPLFCV

SEQ ID NO: 4244 - protein, 690 aa, Sitodiplosis mosellana
MQSTVSSRDDDFDNDFFNSNGDEIIKMCFQGVLRQNYTNDRMFMVPGFRQIVIKILGEWFPWPMNRFFGNTFKYLYEQYATNVKTNLKTHCEKRSRKFFKMRCYELNHMCLCGDLELDELFDGDDIKNAINYTYNRRDSTRGNANAIRKLEILLAELYWIGAPHRPDDPHPFNIREFVELNWFQALRMFMNIQRDIHNFHLSFANLRQSWNLFRKYPLYVQQPEFPEPPEITTFTVIPKCTFQRRHVKIDTDALHNILCGIKAMPRTKGTRVLRNGEYQQRWISQTEFKERGGWRLFFNMDEIIKLVKNKKEFGDSIISDGVSASVLFKLPKQCKTVADEDEAETKRKYFAGKFAYALGIDPGMRTFIASVRLDLKTGEETNEKISFKQYHLKSKQDARNIKAERMTRGFTYDEQADLKRIAAEIGQTPSPRNISWRHYIEHRLRMSQDGIAAYSQKNYARLRLDKHIEWRRAIDLIAGKLVHFKTAIINIGAAEISPNCPIRIKKYVRCPGVRKLIAAFKIRGNCVVRLVDEYMTSQHCARCFKRFPIWTKSKRYKKCNDCQPDERVGLPRTIYTNVSKRVLQMQRKIMRTWEEMRDQGDAIAAILTQRNSGRLVSKKQRFFKTWQPNAAENAGTEDAAQSRKLLKSLWHRDISAAKLIMYKGLCTLLDIPIHPALLRRPDDDGVPLNP

SEQ ID NO: 4245 - protein, 728 aa, Sitodiplosis mosellana
MKRKRAQNGRPRSVKLSLDSVLRDQYRANFVAQVTNWCHTATVITVLASFLFLFENNRAFDEDNHGFFRGNGYELIKDCFKNILNENRHKLPLAFRQIIETAVPNFRWPQREGMHNAFNQLIDQYTTNVKNNIKTYSYTRIKTFFVLQRYELNLLGHNISDIDVKNATKAVMFNNIVPSANVERLLEQARMIGIPVGTKLCDLVRGSWFQTIPIFITIQRLVFNHHERYELLNDLWRRYHRDRLHNAMPSIARPPKIKNFRVIPIHDFKMKHIKIDIHLFYSMACKLGAIKLAKGLFGQPVNISKMVYDSNPFVSWDTIFNMDKIQKVGNRKTFDYAIVTDSVAVSLCFLKPECPSHEYSHEQINEMYENGVFRFVLGMDPGVRTWNATVRKHIASGVEENITIDGPKYHFRAKYGKRKRKSEKWLRLFTELEQHDRNQYPFYPSPKGASNWMSYIEHRVKMLQPGMEVYTARKYIRLNLDKHIEETRASDTIAAFLTRKLPSLIFLGAAQMAPNSPIGIKKRLRCPGVRKLLNSFKKLHNCVVVMVDEYKTSQTCAKCFRPFDRRTKKDRYKVCRQCIPHAANITTDKHLSSVIISKKSNRSYQRERRHVVAKYERLNVHPVYSHGLVPKLNVWFKNWQLNTDNTWNDSRHPHQQNTVWHRDEVAAKCILYKGLCMIKGLDVHPQLSRQHHAAAAAAQNNAEGDQDDNDSDSDDDYVYVLDDVSDEE

SEQ ID NO: 4246 - protein, 651 aa, Sitodiplosis mosellana
MPKRKGTPLRGNQRKKKKIVSKTGIEGEIGILAIKMTLKAIVRPQYYQQVKDWFTQKSIECTKICALASLLFLYKVKSANESNNADFFSGDGNKEIKDCFYAVLQKNKEKEEMVPDFRDFVENMEAENRFSWPGNSFFGNQMQYLYKQYTTNLRNNLEMHAERRLYQYLIMRAWQFNAVSTGLTLRNDDIKRAVQWTIDRYDPIKTTDRHWEVKWEKRQLLLDMIAEIGGPEDNDVAIYTTSEGTWFKSINMWLTMQMEVDNFHIWAEENGIEIPKIKNLKVIPIHQFMRQHVKMETDVLIRMMSEMRFRLHGLIIRYEIVEDPMTQFWDEIFDMPKIHRLLKSNKRFRPYIASNGQAVSIMYEVPKSHLDRLVDDEIVRKRYRDGVYVYEIGIDPGMRTWNATVRRNIKTGKEINFTVSSKRYHYLARQGVRDRKAKRWTRRFVAEEQHDRERYQRMPSPKGENWGSYIAHRLTMLKKGIETYTTEKYARLQFDKYIQSNRATDKIANLLTNRKPSIIHMGAVDMPANSPIRIKKHVRCPGNLTNENRVEEEQAHADRQRMREAVEQDPNQAERFVSKVISYQKNWQQSAAIDEDADPAEQEDAAESHDRRILKTCWHRDITAAKLILYKGHCHLFGIQLHFMFTIERIR

SEQ ID NO: 4247 - protein, 728 aa, Sitodiplosis mosellana
MKRKRAQNGRPRSVKLSLNSVLRDQYRANFVAQVNNWCHTATVITVLASLLFLFENNRAFDEDNHGFFSGNGYELIKDCFKNILNENRHKLPLAFRQIIEAAVPNFRWPQREGMGNAFNQLIDQYTTNVKNNIKTYSYTRIKTFFVLQRYELNLLGHNISDIDVKNATKSVMFNNIVPSANVERLLEQARMIGIPVGTKLCDLVRGSWFQTIPIFITIQRLVFNHHERYELLNDLWRRYYRDRLHNAIPSIARPLKIKNFRVIPIHDFKMKHIKIDIHLFYQMACKLGAIKLAKGLFGQPVNISKKVYDSNPFVPWDTIFNMDKIQKVGNRKTFDYTIVTDSVAVSLCFLKPECPSHEYSHEQINEMYENGVFRFVLGMDPGVRTWNATVRKHIASGVEENITIDGPKYHFRAKYGKRKRKSEKWLRLFTELEQHDRNQYPFYPSPKGASNWMSYIEHRVKMLQPGMEVYTARKYIRLNLDKHIEETRASDTIAAFLTRKLPSLIFLGAAQMAPNSPIGIKKRLRCPGVRKLLNSFKKLHNCVVVMVDEFKTSQTCAKCFRPFDRRTRNDRYKVCRQCIPHAANITTDKHLSSVIISKKSNRSYQRERRHVVAEYERLNVHPVYSHGLVPKLNVWFKNWQLNTDNTWNDSRHPHQQNTVWHRDEVAAKCILYKGLCMIKGLDVHPQLSRQHHAAAAAAHNNAEGDQDDNDSDSDDDYVYVLDDVSDEE

SEQ ID NO: 4248 - protein, 486 aa, Sitodiplosis mosellana
MYEYIQKDWFESLWMWIGMQRIVEKFLIDTAHLRQQWKAYDRDPVNNREPSVPKIPKVKNFAAIPLSDTKLKHIPFDHIDLIDIIGQLRNERGWDIRADYRTYYKQGENKDEAWGIVFDMDKIRQLRTGSKEFHHKIQTNSSAVSVLFSRPKRKGAGVTLEQIKAKYEKPVSKGGYMYESGIDPGQKTKMACVRRTLATGSETNIKLSSIQYHWGARQGIRDKRATKMTRKYVRKEQRDLKSCPIASVSPRGSQWKSFIKHKIKMLTDSLATYARRTYAQLSLHKYIESNREMDLMAKHITKNETGVVFLGDAAFPSNSKIGVKRTKRTSDQRMFIVSLKKDGKTDVVLTPEPYTSQTCANCLRRFPRSTKSDRFKVCKDCRPHKDVRLPPVIVTDRSRRRKQRNRKQNASQKPTANVTRAERAGKHREKRRSERESHNPEQLDTEEAVRWYNRRIRRRELRQRRRVAGHRSRKVTKQPEAESDLP

SEQ ID NO: 4249 - protein, 425 aa, Sitodiplosis mosellana
MDKIRQLRTGSKEFHHKIQTNSSAVSVLFSRPKRKGAGVTLEQIKAKYEKPVSKGGYMYESGIDPGQKTKMACVRRTLATGTETNIKLSSIQYHWGARQGIRDKRATKMTRKYVRKEQRDLKSCPIASVSPRGSQWKSFIKHKIKMLTDSLATYARRTYAQLSLHKYIESNREMDLMAKHITKNETGVVFLGDAAFPSNSKTGVKRTKRTPDQRKFINSLKKDGKTDVVLTPEPYTSQTCANCLRRFPRSTKSDRFKVRKDCRPHKDVRLPPVIVTDRSRRRKQRNRKQNASQKPTANVTRAERAGKHREKRRSERESHNPEQLDTEEAVRWYNRRIRRRELRQRRRVAGHRSRKVTKQPQAESDLPVIPKCTFQRRHGKIDTDALYNILCGVKAMKASTQVAQITLASGHISSRTDLVQRFIIY

SEQ ID NO: 4250 - protein, 208 aa, Sitodiplosis mosellana
MKTSSKRYHYDIKHGVRKNKGEKMTRLFTFEEEYDRNRIHSDIKEVPSPRGTKWSFYIQHRLRMLGNGIEAYTARSYARLRLDKLIEWHRAIDLFAGRLVNHKPALIFFGCGTVAPNSPIRIKKHKKHVRCPGNRKIDRSLQETRQLRHKNGRRILHITNCFGRFPPQTKSYRYILCADCRPDQRAMLPTFIVTNVSERALQTKRAIE

SEQ ID NO: 4251 - protein, 2171 aa, Sitodiplosis mosellana
MAPSCSSKEVKQEDKRSEIKNEKSDVVKDAKKDDDPPKFIPFAVRKRADTVAAGSRKQTVQALKKKYQDQRIAKNKAQCKTRSSTAKEAEMSKMQKSKQNEVDGTPNDSPGKGRNKRKLRGNVGNIQPEEEPVIVKAPKTPRDSITRIQLPQKTLPADTTKGQKVGTRTTKSIGSIPAKSEEKEKDKEKAKEKGKEKETEESTRTTRQRSYSLPKPEVKPPKTPEKSANQAESATPKSAKSKNAKKNANDTVEGDFSSDDDLPLVEKKKAKAARQEKPKRNLKRISNRQNQSIESNERDRSGDRKSDLSSSEPKRKVPATNRKSAQNKNTSNTQSHAKSTVSDKSENESQQESKNDAKVVSRKRRNEFTDLSQTDQSENETKTGRPMRKTKEAAAIYMELIGQKLNLSDFDDDLSVDSFPELPNVKKTEQMENELKANLGKEKRELTSTPKRGRPKREDASLVPEEKPETTQKLIENGHKEEKSKTGEKKKLEKSFSDSDDEPLATDLMPSKEESGKIFGIASVTLAQSSGPIDTKCTLGKCGSIHKPSLGPGVPTEAYLGDQMSNKDRRKAKVNMTHEQIEKWLSECSMTADPFVNDSLDDELDLTSSPKPINYLSTPSPLHTLRDGDNFRDESSSSTKFRTQTPKEGKLTQVQQTTPVKGKINLFPKGECTKTSTEKEDKTLANQTKPIVAKKEAQIVLEKASVSKKPTSTNQIKSADADETKNESIKPISVVKVQSSPNKPNVSGIPITPDKKPIYNRRTPVYNTKKTDQGTVKSPPVVNTFGAFSPENEASVYSFDKEEDNMPASIPFRRHSRRGSTHSKNNENDTTIKTTNIAQMAKSNQRDQPAKKQQIFLALGPEDGKTSAPIPVLAKPNAKDNDKDKGKKSLVNESELGKAIMASDNDGKDSDSEGHTFYIPLQCMANTGNASDQLIQGVAVKLGTEGPEGPNQKVIMHAKLVTKSQMSANTAPIPEGMGMANIHEIVKNLIANKEVKTKSTKRTKNEQTIQPSNNTAFPRYDDPAQMVEAPVFKPTEREFQDPIEFINRITPIAARFGLCRIIPPSTFKPECKISDDMRFTAYNQYVHKMLHRWGPSVKEFSAIKKYLATQCITLNQPPLIGGMEVDLPRLYHTVQELGGLKEVIEKKKWARVAEEMCIPKSAQDRVTKLDDIYCKYLLPYDTLSPSERQKLFESVEADWAKSEAKARRNADRSALSESNSNENSDEEQSDEDDDESGDSGSMECIVKGKSMALSAFFRVARNTMALWFRNTEPITSEVEAEFWRHVAGVTVPTLHVGMLFSACCWYRDPHGLPWIEYLHTGGSKIWYSVPNEQSTNFRTAFTSLVPTHCQNKTVWLPCDTAMVPPHMLTDRGVSLCRTEQEPGQFVVVFPRAYTSNICTGYSISESVYFAPMSWLETAKEDFKLFIMARGACGARGGSDERFTTVKLALRTIIQKPYRLILTTVIGEMNIMATLISLLASLYFLYLVNTAVDDFNNDFFNGGDEIIKMCFQGVLRQNYTNDRMFMVPGFRQMVVNILGEWFPWPTNRFFGNTFKYLYEQYATNVKTNLKTHCEKRLRKFFKMRCYELNHMCLCGDLELDELFDGDDIKNAINYTYNRRDSTRGNANAIRKLEILLAELYWIGAPYRPDDPHPFNIREFIELNWFQALRMFINIQRDIHNFHLAFANLRQSWNLFRKYPLYVQQPEMPEPPEITTFTVIPKCTFQRRHVKIDTDALHNILCGIKAMPRTKGTRVLRNGEYQHRWISQTEFKERGGWRLFFNMDEIIKLVKNKKEFGDSIISDGVSASVLFKLPKQSKTVADEDEAETKRKYFAGEFAYALGIDPGMRTFIASVRLDLKTGEETNEKISFKQYHLKSKQDARNIKAERMTRVFTYDEQADLKRIAAEIGQTPSPRNISWRHYIEHRLRMSQDGIAAYSQKNYARLRLDKHIEWRRAIDLIAGKLVHFKTAIINIGAAEISPNCPIRIKKYVRCPGVRKLIAAFKRRGNCVVRLVDEYMTSQHCARCFKRFPIWTKSKRYKKCNDCQPDERVGLPRTIYTNVSKRVLQMQRKIMRTWEEMRDQVDAIAAILTQRNSGRLVSKKQRFFKTWQPNAAENAGTEDAAQSRKLLKSLWHRDISAAKLIMYKGLCTLLDIPIHPALLRRPDDDGVPLNP

SEQ ID NO: 4252 - protein, 774 aa, Sitodiplosis mosellana
MDIGAVLCLLLIISFSSERQSTSKGQASDLANLVKILVKTTAKPGRLTVMACWNSGVENNDFALFGGSGEDKIKLCFEQVLWHNNQPPKPKSTYKPRGEKPRGPRAELPRIDPEFKAIVEGLDDYHRIDWPNNKDFCNGLKHLTNQYTDNVVTNLKTHANKHITQYLKLKVFQWNSDVGDDAEKFLPSDIASVVNLIVKQKDIKVPIRDPNKLERCSVLYDMVNDLNVFPEIDLHDLTTDPKHWFKAMPMYLSMQREIEEYNSEWPHQRRPKRKKRKRKKTKGKWKRKRSQMLDNPDFRPLIRNLVVVPMCDFRRTHFKIDCSSMHQVLSSQKLLPKVEIENKKGTTSTKTIQQKDFNHSRDYWWNQYFYMRKIRRFVRAKKQFDYSINTDGISVSLQYSAKKKTDNKEIDQKSRIIQKIEDGTIKNYSGVDTGVRSWNTTTTHDIETGKETNFVMSSKQFHWQTGQKVRNAKAKRWTKNFVEMERADRENRDLYPVMPSPKGSTWLNYIKHRVKMMKHGICAYSTAKYTRLALDKHIKSSSVVDEWVNKVTDKKPTLFFFGADGEIPPDSPISIKKHVRCPGVRKTLRSIKKRRDCFIQLVDEWGTSQTDARCMNRFQNQNKAARFKKCRCVPDARTLLPTKIVSKLGKTDLSIYRQLQRAMNEEALVGDERLFPKVKCYYKNWRLNLECSVIWHRDVVAAKNILLKGLWTLLGLPIPEAINRYWREAAEAAAAVAAAAAARATAEAAAAAVAIVDNDVEMFENDQQPADHAV

SEQ ID NO: 4253 - protein, 746 aa, Sitodiplosis mosellana
MARGARGSRGGSDDRFTTVKLALRTIIQKPYRLILTTVIGEMSIMATLISLLASLYFLYLVNTAIDDFNNDFFNSDGDEIIKMCFQGVLRQNYTNDRMFMVPGFRQMVIKILGEWFPWPTNRFFGNTFKYLYEQYATNVKTNLKTHCEQRLRKFFKMRCYELNHMFLSGKIQLDELFDGDDIKNAINYTYNRRDSTRGNANAIRKLEILLAELYWIGAPHRPDDPHPFNIREFVELNWFQALRMFINIQRDIHNFHLSFANLRRSWNLFRKHPLYVQEPEFPEPPEITTFTVIPKCTFQRRHVKIDTDSLYNILCGIKAMKREDGLRVNKKGEVLQRYISQTEFKRIGSWRSYFNMDEINKLVKNKKEFGDSIISDGVSASVLFKLPKQSKTVADEDEAETKRKYFANEFAYALGIDPGMRTFIASVRLDLKTGEETNEKISFKQYHLKSKQDARNIKAERMTRVFTYDEQADLKRIAAEIGQTPSPRNISWRHYIEHRLRMSQDGIAAYSQKNYARLRLDKHIEWRRAIDLIAGKLVHFKTAIINIGAAEISPNCPIRIKKYVRCPGVRKLIAAFKRRGNCVVRLVDEYMTSQHCARCFKRFPIWTKSKRYKKCNDCQPDERVGLPRTIYTNVSKRVLQMQRKIMRTWEEMRDQGDAIAAILTQRNSGRLVSKKQRFFKTWQPNAAENAGTEDAAQSRKLLKSLWHRDISAAKLIMYKGLCTLLDIPIHPALLRRPDDDGVPLNP

SEQ ID NO: 4254 - protein, 728 aa, Sitodiplosis mosellana
MKRKRAQNGRPRSVKLSLNSVLRDQYRANFVAQVTDWCHTATVITVLASLLFLFENNRAFDEDNHGFFSGNGYELIKDCFKNILNENRHKLPLAFRQIIEAAVPNFRWPQREGMGNAFNQLIDQYTTNVKNNIKTWCYTRIKTFFVLQRYELNLLGHNISDIDVKNATKSVMFNNIVPSANVERLLEQARMIGIPVGTKLCDLVRGSWFQTIPIFITIQRLVFNHHERYELLNDLWRRYYRDRLHNAMPSIARPPKIKNFRVIPIHDFKMKHIRIDIHLFYQMACKLGAIKLAKGLFGQPVNISKKFYDSNPFVSWDTIFNMDKIQKVGNRKTFDYTIVTDSVAVSLCFLKPECPSHEYSHEQINEMYENGVFRFVLGMDPGVRTWNATVRKHIASGVEENITIDGPKYHFRAKYGKRKRKSEKWLRLFTELEQHDRNQYPFYPLPKGASNWMSYIEHRVKMLQPGMEVYTARKYIRLNLDKHIEETRASDTIAAFLTRKLPSLIFLGAAQMAPNSPIGIKKRLRCPGVRKLLNSFKKLHNCVVVMVDEFKTSQTCAKCFRPFDRRTRNDRYKVCRQCIPHAANITTDKHLSSVIISKKSNRSYQRERRHVVAEYERLNVHPVYSHGLVPKLNVWFKNWQLNTDNTWNDSRHPHQQNTVWHRDEVAAKCILYKGLCMIKGLDVHPQLSRQHHAAAAAAHNNAEGDQDDNDSDSDDDYVYVLDDVSDEE

SEQ ID NO: 4255 - protein, 728 aa, Sitodiplosis mosellana
MKRKRAQNGRPRSVKLSLNSVLRDQYRANFVAQVTNWCHTATVITVLASLLFLFENNRAFDEDNHGFFRGNGYELIKDCYKNILNENRHKLPLAFRQIIEAAVPNFRWPQREGMGNAFNQLIDQYTTNVKNNIKTWCYTRIKTFFVLQRYELNLLGHNISDIDVKNATKSVMFNNIVPSANVERLLEQARMIGIPVGTKLCDLVRGSWFQTIPIFITIQRLVFNHHERYELLNDLWRRYYRDRLHNAMPSIARPPKIINFRVIPIHDFKMKHIRIDIHLFYQMARKLGAIKLAKGLFGQPVNISKKVYDSNPFVSWDTIFNMDKIQKVGNRKTFDYAIVTDSVAVSLCFLKPECPSHEYSHKQINEMYENGVFRFVLGMDPGVRTWNATVRKHIASGVEENITIDGPKYHFRAKYGKRKRKSEKWLRLFTELEQHDRNQYPFYPSPKGASNWMSYIEHRVKMLQPGMEVYTARKYIRLNLDKHIEETRASDTIAAFLTRKLPSLIFLGAAQMAPNSPIGIKKRLRCPGVRKLLNSFKKLHNCVVVMVDEFKTSQTCAKCFRPFDRRTRNDRYKVCRQCIPHAANITTDKHLSSVIISKKSNRSYQRERRHVVAEYERLNVHPVYSHGLVPKLNVWFKNWQLNTDNTWNDSRHPHQQNTVWHRDEVAAKCILYKGLCMIKGLDVHPQLSRQHHAAAAAAHNNAEGDQDDNDSDSDDDYVYVLDDVSDEE

SEQ ID NO: 4256 - protein, 733 aa, Sitodiplosis mosellana
MANRFKPSIPAEGETKDEITTIKCALKTIIRPQYQQALMSKITDLSVENNDFALFGGSGEDKIKLCFEQVLWHNNQPPKPKSTYKPRGEKPRGPRAELPRIDPEFKAIVEGLDDYHRIDWPNNKDFCNGLKHLTNQYTDNVVTNLETHANKHITQYLKLKVFQWNSDVGDDAEKFLPSDIASVVNLIIKQKDIKVPIRDPNKLERCSVLYDMVNDLNVFPEIDLHDLTTDPKHWFKAMPMYLSMQREIEEYNSEWPHQRRPKRKKRKRKKTKGKWKRKRRQMLDNPDFRPLIRNLVVVPMCDFRRTHFKIDCTSMRQVLSSQKLLPKVEIENKKGTTSTTIIPEKDFNRDRDYWWNQYFYMRKIRRFVRAKKQFDFSINTDGISVSLQYSAKKKTVNKEIDQKSHIIRKIKDGTIKNYSGVDSGVRSWNTTTTHDIETGKETNFVMSSKQFHWQTGQKVRNAKAKRWTKNFVEMERADRENRDLYPVMPSPKGSMWLNYIKHRVKMMKHGICAYSTAKYTRLALDKHIKSSSVVDEWVNKVTDKKPTLFFFGADGEIPPDSPISIKKHVRCPGVRKTLRSIKKRRDCFIQLVDEWGTSQTDARCMNRFQNQNKAARFKKCRCVPDARTLLPTKIVSKLGKTDLSIYRQLQRAMNEEALVGDERLFPKDYGHYWDFRYQRRSIGIGAKLLKQPLLLPLLLPLEQPHEAAAAAVAIVDNDVEMFENDQQPADHAV

SEQ ID NO: 4257 - protein, 1004 aa, Sitodiplosis mosellana
MPKRKGTPLRGSQRKKKKIVSKTGIEGEIGILAIKMTLKAIVRPQYYQQVKDWFTQKSIECTKICALASLLFLYKVKSANESNNADFFSGDGNKEIEDCFYAVLQKNKEKEEMVPDFRDFVENMEAENRFSWPGNSFFGNQMQYLYKQYTTNLRNNLEMHAERRLYQYLIMRAWQFNAVSTGLTLRNDDIKRAVQWTIDRYDPIKTTDRHWEVKWEKRQLLHDMIAEIGGPEDNDVAIYTTSEGTWFKSINMWLTMQMEVDNFHIWAEENGIEIPKIKNLKVIPIHQFMRQHVKMETDVLIRMMSEMRFRLHGLIIKYEIVEDPMTQCWDEIFDMPKIHRLLKSNKRFRPYIASNGQAVSIMYEVPKSHLDRLVDDEIVRKRYRDGVYVYEIGIDPGMRTWNATVRRNIKTGKEINFTVSSKRYHYLARQGVRDRKAKRWTRRFVAEEQHDRERYQRMPSPKGENWGSYIAHRLTMLKKGIETYTTEKYARLQFDKYIQSNRATYKIANLLTNRKPSIIHMGAVDMPANSPIRIKKHVRCPGNRKLAKSFRKIPNTVVRQVNENRTSQLCGRCFTPFDIATQRDRMKVCEWCLPDNDDWPPNLQLPTKIVSKKSKRTLIADRQRMREAVEQDPNQAERFVSKVISYQKNWQQSAAIDEDADPAEQEDAAESHDRRILKTCWHRDITAAKLILYKAAEQESCMVNAAPGSPDLCILSFKGAFHGRTIGALATTHSKYIHKIDIPSFDWPIASFPQYKYPLEENVRENKAEDDRCLAEVEDLIVTYNKKGKYVAGMIVEPIQSEGGDNEASPEFFQKLQRIGKKHGVGFLIDEVQTGGGPTGKLWAHEHFNLDSSPDIVTFSKKMQLGGYYHSADFKPTQAYRVFNTWMGDPGKLLLLEAILNVIKRDGLLENVTRVGDKLKKGLIQAQNDYPALLNSARGRGTFLAINCQSSELRDDIINRLKTKGIQAGGCGDKAIRFRPALVFQEKHADIFFDKFNQVLKETK

SEQ ID NO: 4258 - protein, 702 aa, Sitodiplosis mosellana
VENNDFALFGGSGEDKIKLCFEQVLWHNNQPPKPKSTYKPRGEKPRGPRAELPRIDPEFKAIVEGLDDYHRIDWPNNKNFGNGLKHLTNQYTDNVVTNLETHANKHITQYLVLKVFELNSNLEEDGEKFLPSDIENVVKLIIKQKDIKVPSRDPNKLVRCEVLYDIVRDCNVFPEIDLHDLTTDPKHWYKAMPMYLSMQREIEEYHAMWPHQHRSKRKKRKRKKTKGKWKRKRRQMLDNPDFRPLIRNLVVVPVCDFRRTHFRIDCTSMRQVLSSQKLLPKVEIENKKGTTSTIIIPEKDFNRDRDYWWNQYFYMRKIRRFVRAKKQFDFSINTDGISVSLQYSAKKKTANKETDQKSRIIQKIEDGTIKNFSGVDTGVRSWNTTTTHDIETGKETNFVMSSKQFHWQTDQKVRNAKAARWTKNFVEMERADRENRELYPVMPSPKGSMWLNYIKHRVKMMKHGICAYSTAKYTRLALDKHIKSSSVVDEWVNKVTDKKPTLFFFGADGEIPPDSRISIKKHVRCPGVRLTLRSIKKRRDCFIQLVDEWGTSQTDARCMNRFQNQNKAARFKKCRCVPDARTLLPTKIVSKLGKTDLSIYRQLQRAMNEEALVGDESLFPKVKCYYKNWQLNLECSVIWHRDVVAAKNILLKGLWTLLGLPIPEAINRYWREAAEAAAAAVAIVDNDVEMFEYDQQPADHAV

SEQ ID NO: 4259 - protein, 352 aa, Sitodiplosis mosellana
MYEYIQKDWFESLWMWIGIQRIVEKFLIDTAHLREQWKAYDRDPVNSREPSVPKIPKVKNFAAIPLSDTKLKHIPFDHIDLIDIIGQLRNERGWDIRADYRTYYKQGENKDETWGIVFDMDKIRQLRTGSKDSAVSVLFSRPKRKGAGETLEQIKAKYEKPVSKGGYMYESGIDPGQKTKMACVRRTLDTGTETNIKLSSIQYHWGARQGMRDKQATKMTRKYVHKEQRDLKSCPIASVSPRGSQWKSFIKHKIKMLTDSLATYARRKYAQLSLHKYIESNREMDLMAKHITKNETGVVFLGDAAFPSNSKIGVKRTKRTPDQRKFIVSLKKDGKTDVVLTPEPYTSQTCAN

SEQ ID NO: 4260 - protein, 1015 aa, Sitodiplosis mosellana
QKTNNKVDDSNPFLDIATSFLQETFANQQGGRGGGNGIGGNGIAGIAQLIGSLVQQDGSKSNGGGIGAAQILTGLSQLMNANGGDNGGGGSGFDPSIIGNVIEMFTAAGDNSDDDDDQPQAKRRKRSNSGQDGGIGIDTILNIASAFMGNTNNVDSHADKSNEGLMSLLPMAIQAINSFNGPAGEKVHAKHKDHQWVLPPFLERIHVLWDHFSNSELAEALWEKSGVNQIFKGFTGRDGKLDYDKLFNSLHNQAFRRRWLKATTLYLSDWVNYIAEPEVYKRSNLVSMKRKRAQNGRPRSVKLSLNSVLRDQYRANFVAQVNNWCHTATVITVLASLLFLFENNRAFDEDNHGFFSGNGYELIKDCFKNILNENRHKLPLAFRQIIEAAVPNFRWPQREGMGNAFNQLIDQYTTNVKNNIKTYSYTRIKTFFVLQRYELNLLGHNISDIDVKNATKSVMFNNIVPSANVERLLEQARMIGIPVGTKLCDLVRGSWFQTIPIFITIQRLVFNHHERYELLNDLWRRYYRDRLHNAMPSIARPPKIKNFRVIPIHDFKMKHIRIDIHLFYQMACKLGVIKLAKGLFGQPVNISKKVYDSNPFVSWDTIFNMDKIQKVGNRKTFDYTIMTDSVAVSLCFLKPECPSHEYSHEQINEMYENGVFRFVLGMDPGVRTWNATVRKHIASGVEENITIDGLKYHFRAKYGKRKRKSEKWLRLFTKLEQHDRNQYPFYPSPKGASNWMSYIEHRVKMLQPGMEVYTARKYIRLNLDKHIEETRASDTIAAFLTRKLPSLISLGAAQMAPNSPIGIKKRLRCPGVRKLLNSFKKLHNCVVVMVDEFKTSQTCAKCFRPFDRRTRNDRYKVCRQCIPHAANITTDKHLSSVIISKKSNRSYQRERRHVVAEYERLNVHPVYSHGLVPKLNVWFKNWQLNTDNTWNDSRHPHQQNTVWHRDEVAAKCILYKGLCMIKGLDVHPQLSRQHHAVAAAAQNNPEGDQDDNDSDSDDDYVYVLDDVSDEE

SEQ ID NO: 4261 - protein, 727 aa, Sitodiplosis mosellana
MRKRAQNGRPRSVKLSLNSVLRDQYRANFVAQVNNWCHTATVITVLASLLFLFENNRAFDEDNHGFFSGNGYELIKDCFKNILNENRHKLPLAFRQIIEAAVPNFRWPQREGMGNAFNQLIDQYTTNVKNNIKTYSYTRIKTFFVLQRHELNLLGHNISDIDVKNATKSVMFNNIVPSANVERLLEQARMIGIPVGTKLCDLVRGSWFQTIPIFITIQRLVFNHHERYELLNDLWRRYHRDRLHNAMPSIARPPRIKNFRVIPIHDFKMKHIRIDIHLFYQMACKLGAIKLAKGLFGQPVNISKKVYDSNPFVSWDTIFNMDKIQKVGNRKTFDYAIVTDSVAVSLCFLKPECPSHEYSHEQINEMYENGVFRFVLGMDPGVRTWNATVRKHIASGVEENITIDGPKYHFRAKYGKRKRKSEKWLRLFTELEQHDRNQYPFYPSPKGASNWMSYIEHRVKMLQPGMEVYTARKYIRLNLDKHIEKTRASDTIAAFFTRKLPSLIFLGAAQMAPNSPIGIKKRLRCPGVRKLLNSFKKLHNCVVVMIDEYKTSQTCAKCFRPFDRRTKKDRYKVCRQCIPHAANITTDKHLSSVIISKKSNRSYQRERRHVVAEYERLNVHPVYSHGLVPKLNVWFKNWQLNTDNTWNDSRHPHQQNTVWHRDEVAAKCILYKGLCMIKGLDVHPQLSRQHHAAAAAAHNNAEGDQDDNDSDSDDDYVYVLDDVSDEE

SEQ ID NO: 4262 - protein, 901 aa, Sitodiplosis mosellana
MHPLAYELKLIPFLFEGNFTFSGNVRIKVNVTKSCRNITLHAIALKMIEVNVWKIGNTTQTDDNSRTVVEVSDKYAIEPDQFFVIVFPNELEPNTIYEINIKYMGVLNDMLQGFYRSSYVVNNVTRVEMDSYVWDEFEESVPMSTYLLAFVISDFKNITDGKFSVWAREEAIESARYALEVGPKILSFFEEYFVIKYPLPKIDMIALPDFGAGATVITVLASLLFLFENNRAFEEDNHDFFRGNGYELIKDCFKNILNENRHKLPLAFRQIIETAVPNFRWPQREGMQNAFNQLIDQYTTNVKNNIKTYSYTRIKTFFVLQRHELNLLGHNISDIDVKNATKSVMFNNIVPSANVERLLEQARMIGIPVGTKLCDLVRGSWFQTIPIFITIQRLVFNHHERYELLNDLWRRYHRNRLHNAMPSIARPPRIKNFRVIPIHDFKMKHIRIDIHLFYQMACKLGAIKLAKGLFGQPVNISKKVYDSNPFVSWDTIFNMDKIQKVGNRKTFDYAIVTDSVAVSLCFLKPECPSHEYSHEQINEMYKNGVFRFVLGMDPGVRTWNATVRKHIASGVEENITIDGPKYHFRAKYGKRKRKSEKWLRLFTELEQHDRNQYPFYPSPKGASNWMSYIEHRVKMLQPGMEVYTARKYIRLNLDKHIEETRASDTIAAFLTRKLPSLIFLGAAQMAPNSPIGIKKRLRCPGVRKLLNSFKKLHNCVVVMVDEFKTSQTCAKCFRPFDRRTKKDRYKVCRQCIPHAANITTDKHLSSVIISKKSNRSYQRERRHVVAEYERLNVHPVYSHGLVPKLNVWFKNWQLNTDNTWNDSRHPHQQNTVWHRDEVAAKCILYKGLCMIKGLDVHPQLSRQHHAAAAAAQNNAEGDQDDNDSDSDDDYVYVLDDVSDEE

SEQ ID NO: 4263 - protein, 538 aa, Sitodiplosis mosellana
MIGIPVGTKLCDLVRGSWFQTIPIFITIQRLVFNHHERFELLNDLWRRYHRDRLHNAMPSIARPPKIKNFRVIPIHDFKMKHIRIDIHLFYQMARKLGAIKLAKGLFGQPVNISKKVYDSNPFVSWDTIFNMDKIKKVGNRKTFDYAIVTDSVAVSLCFLKPECPSHEYSHEQINEMYENGVFRFVLGMDPGVRTWNATVRKHIASGVEENITIDGPKYHFRAKYGKRKRKSEKWLRLFTELEQHDRNQYPFYPSPKAASNWMSYIEHRVKMLQPGMEIYTTRKYIRLNLDKHIEETRASDTIAAFLTRKLSSLIFLGAAQMAPNSPIGIKKRLRCPGVRKLLNSFKKLHNCVVVMVDEYKTSQTCAKCFQPFDRRTRKDRYKVCRQCIPHAANITTDKHLSSVIISKKSNRLYQRERRHVVAEYERLNVDSVYSHGLVPKLNVWFKNWQLNIDNTWNDSRHPHQQNTVWHRDEVAAKCILYKGLCMIKGLDVHPQLSRQHHAAAAAAQNNAEGDQDDNDSDSDDDYVYVLDDVSDEE

SEQ ID NO: 4264 - protein, 698 aa, Sitodiplosis mosellana
MGRVIRAQRKGAGSVFVAHTKKRKGAAKLRSLDYAERHGYIKGVVKEIVHDPGRGAPLALVHFRDPYRYKTRKEVFIAPEGLYTGQFVYCGKKATLQIGNVMPLSQMPEGTIVCNLEEKTGDRGRLARTSGNYATVIAHNPDTRKTRVKLPSGAKKVVPSNNRAMVGIVAGGGRIDKPILKAGRAYHKYKVKRNCWPKVRGVAMNPVEHPHGGGNHQHIGKASTVKRGTSAGRKVGLIAARRTVIPKCTFQRRHVKIDTDALHNILCGIKAMPRTKGTRVLRNGEYQQRWISQTEFKERGGWRLFFNMDEIIKLVKNKKEFGDSIISDGVSASVLFKLPKQSKTVADEDEAETKRKYFAGEFAYALGIDPGMRTFIASVRLDLKTGEETNEKISFKQYHLKSKQDARNIKAERMTRVFTYDEQADLKRIAAEIGQTPSPRNISWRHYIEHRLRMSQDGIAAYSQKNYARLRLDKHIEWRRAIDLIAGKLVHFKTAIINIGAAEISPNCPIRIKKYVRCPGVRKLIAAFKRRGNCVVRLVDEYMTSQHCARCFKRFPIWTKSKRYKKCNDCQPDERVGLPRTIYTNVSKRVLQMQRKIMRTWEEMRDQGDAIAAILTQRNSGRLVSKKQRFFKTWQPNAAENAGTEDAAQSRKLLKSLWHRDISAAKLIMYKGLCTLLDIPIHPALLRRPDDDGVPLNP

SEQ ID NO: 4265 - protein, 233 aa, Sitodiplosis mosellana
MDEIIKRNLRMHWELIQACEPLLQSVRLDLKTGEETKISFKQYHQKSKQDARNIKAERMTRVFTYDEQADLKRIAAEIGQTPSPRNISWRHYIEHRLRMSQDGIAAYSQKNYARLRLDKHIEWRRAIDLIAGKLVHFKTAIINIGAAEISPNCPIRIKKYVRCPGVRKLIAAFKRRGNCVVRLVDEYMTSQHCARCFKRFPTWTKSKRYKKCNDCQPDERVGLPRTIYTNVSK

SEQ ID NO: 4266 - protein, 1190 aa, Sitodiplosis mosellana
MASTASEPEIAKHAVLVKSEKLPDVTPVVKGYEWNNGIDYDQLLGSYVHSGFQATNLGKAIDEVNKMLDCREIPIRKEDVDFYEEDEFIRRKSNCTIFLGYTSNIVSSGLRETIRFLVEHKMVDCIVTTAGGVEEDLIKCLAPTFIGSFELDGKTLQMQSAEYSPDVVKALDTLIDDPTLDYLDTTCGCNTIEYLLKELNKHNLINSQHVQQFASQRDPVMVLLSKMDLNHQPSSIIQHLKKAEAPLNGILKALDNDYNKMQEPGMLGMLCELLSGNNFELILSVATMEGQLKTFVSRLIRWNEKSRQVGGEVDNTAVNRSALFDVTFLMLTFIVQTYGSHVVLDGNGDTFFEKWVRDFMIEKNRNKSAMNMVHQCEQSKVDEFLTSISSNDGSMAKILNLRWHEICLILPGVLYQLLVAWENDTISAADVIVHLDNIKSRLCTYSVCVASWLCSYMQIVRDDELLKPLNMVQQFVTLNTSDEMNATNNECLNLTSQIIRKMQTDAHQNQKVRSPMLNIVSNQPLEEQFCEVWSTVSSRGWLSVKATQVLDNLLQSCGPYWLVSKMVNEIIFCKFSKMGYQRKKAKKKGKPIAVLGDVIKEDEKEKDFGIRTVKTQLRAILRPEYRDLLTAAITERSMMATKICVLASWLFLFRCERAFEDNDKGFFEQNGEKVIRSCFYGVLKKNIYKKDKMSPEFRKMVQQLDDSHRVVWPNADYFGNGMNDLIDTYVTNVKNNLKTHSKKRLREWLRVKVFESSLVVRYEQTDIDRVISLAIYGNDDIKINGMDDVAKRERRTLLIEMVTKNSGWDIPDNNIGLFTNGKDWFKSIAFWISLQRKIDDFNTCEEYREERRCQREEFQELKRCRRRNHRPCTCQQPVDRGQNGNEYIEKGPPRVKNLAVIPICSFTRTHFTLDIRTLYSLLRQLGIVPLNITEDEFRKQKEYYWGQYFDMRKIYHLVHKYTRLNFDKYVRANSVTDSIAGMLTNHQPTLVHFGAAQMSPSSPIGIKKSLRCPGNRKMIRSYKKCRGCVVNMVDEYYTSQTCAKCFGRFDRRTKRHRFKVCHDCRPKLVEAMLPSMIVCKVNKRKMRQEKLKLVLLEKEAEEGNGNPAVGNDVPHPDQLNPELLANVAIYHKIWHPVRWKLSSHEYTRRHGHRDIAAAKCILIKGHCDLFGYELPETLQRPSNQRAAVNN

SEQ ID NO: 4267 - protein, 261 aa, Sitodiplosis mosellana
MAAYGSKEYAKIDYDAWAQTRRTLVYIARMIVGKGKDVVVIVGDKLPGANSLGFGYSGTQVHGLFKLLDEHPQCTVYYGSEHRTSKCCCHCGQVLLDARMGESRSLAEKEDRRPRDHGKRTEKSRTKVCLMCKPMDLKKMLPMMRSPLPENTIYVLKNKRELQIEREAANQGQSHPKNQKYAHLEKITWKSKHTISKTTGKRFRRRKTKWRMRQIENDDIDVCFSIWKRHQFNGAYALDAVASRSLNRDINASINIRTLCK

SEQ ID NO: 4268 - protein, 728 aa, Sitodiplosis mosellana
MKRKRAQNGRPRSVKLSLNSVLRDQYRANFVAQVTNWCHTATVITVLASLLFLFENNRAFDEDNHDFFRGNGYELIKDCFKNILNENRHKLPLAFRQIIETAVPNFRWPQREGMHNAFNQLIDQYTTNVKNNIKTYSYTRIKTFFVLQRYELNLLGHNISDIDVKNATKAVMFNNIVPSANVERLLEQARMIGIPVGTKLCDLVRGSWFQTIPIFITIQRLVFNHHERYELLNDLWRRYYRDRLHNAIPSIARPPKIKNFRVIPIHDFKMKHIRIDIHLFYQMACKLGAIKLAKGLFGQPVNISKKVYDSNPFVSWDTIFNMDKIQKVGNRKTFDYTIVTDSVAVSLCFLKPECLSHEYSHEHINEMYENGVFRFVLGMDPGVRTWNATVRKHIASGVEENITIDGPKYHFRAKYGKRKRKSEKWLRLFTELEQHDRNQYPFYPSPKGASNWMSYIEHRVKMLQPGMEVYTARKYIRLKLDKHIEETRASDTIAAFLTRKLPSLIFLGAAQMAPNSPIGIKKRLRCPGVRKLLNSFKKLHNCVVVMVDEFKTSQTCAKCFRPFDRRTKKDRYKVCRQCIPHAANITTDKHLSSVIISKKSNRSYQRERRHVVAEYERLNVHPVYSHGLVPKLNVWFKNWQLNTDNTWNDSRHPHQQNTVWHRDEVAAKCILYKGLCMIKGLDVHPQLSRQHHAAAAAAHNNAEGDQDDNDSDSDDDYVYVLDDVSDEE

SEQ ID NO: 4269 - protein, 231 aa, Sitodiplosis mosellana
MIVGKGKDVVVIVGDKLPGANSLGFGYSGTQVHGLFKLLDEHPQCTVYYGSEHRTSKCCCRCGQVLLDARMGESRSLAEKEDRPRDHGKRTEKSRTKVCLMCKPMDLKGMLPMMRSPLPENTIYVLKNKRELQIEREAANQGQSHPKNQKYAHLEKITWKSKHTISKTTGKRVRRRKTKWRMRQIENDDIDVCFSIWKRHQFNGAYALDAVASRRFNRDINASINIRTLCK

SEQ ID NO: 4270 - protein, 670 aa, Sitodiplosis mosellana
MAQQSATKTEVKAIVEGLDDYHRIDWPNNKDFCNGLKHLTNQYTDNVVTNLETHANKHITQYLKLKVFQWNSDVGDDAEKFLPSDIASVVNLIIKQKDIKVPIRDPNKLERCSVLYDMVNDLNVFPEIDLHDLTTDPKHWFKAMPMYLSVQREIEEYNSEWPHQRRPKRKKRKRKKTKGKWKRKRSQMLDNPDFQPLIRNLVVVPMCDFRRTHFKIDCSSMHQVLSSQKLLPKVEIENKKGTTSTKTIQQKDFNHSRDYWWNQYFYMRKIRRFVRAKKQFDYSINTDGISVSLQYSAKKKTDNKEIDQKSRIIQKIEDGTIKNYSGVDSGVRSWNTTTTHDIETGKETNFVMSSKQFHWQTGQKVRNAKAKRWTKNFVEMERADRENRDLYPVMPSPKGSMWLNYIKHRVKMMKHGICAYSTAKYTRLALDKHIKSSSVVDEWVNKVTDKKPTLFFFGADGEIPPDSPISIKKHVRCPGVRKTLRSIKKRRDCFIQLVDEWGTSQTDARCMNRFQNQNKAARFKKCRCVPDARTLLPTKIVSKLGKTDLSIYRQLQRAMNEEALVGDERLFPKVKCYYKNWRLNLECSVIWHRDVVAAKNILLKGLWTLLGLPIPEAINRYWREAAEAAAAVAAAAAARATAEAAAAAVAIVDNDVEMFENDQQPADHAV

SEQ ID NO: 4271 - protein, 717 aa, Sitodiplosis mosellana
MARRARGSRGGSDERFTTVKLTLRTIIQKPYRLILTTVIGEMSIMATLISLLALLYFLYLVNTAVDDFDNDFFNSNGDEIIKMCFQGVLRQNYTNDRMFMVPGFRQIVIKILGEWFPWPTNRFFGNTFKYLYEEYATNVKTNLKTHCEKRLRKFFKMRCYELNHMCLCGDLELDELFDDDDIKNAINYTYNRRDSTRGNANAIRKLEILLAELYWIGAPHRPDDPHPFNIRKFVELNWFQALRMFMNIQRDIHNFHLSFANLRQSWNLFRKYPLYVQQPEFPEPPEITTFTVIPKCTFQRRHVKIDMDALHNILCGIKAMPRTKGTRVLRNGEYQQRWISQTEFKERGGWRLFFNMDEIINKTVADEDEAETKRKYFAGEFAYALGIDPGMRTFIASVRLDLKTGEETNEKISFKQYHLKSKQDARNIKAERMTRVFTYDEQADLKRIAAEIGQTPSPRNISWRHYIEHRLRMSQDGIAAYSQKNYARLRLDKHIEWRRAIDLIAGKLVHFKTAIINIGAAEISPNCPIRIKKYVRCPGVRKLIAAFKRRGNCVVRLVDEYMTSQHCARCFKRFPIWTKSKRYKKCNDCHPDERVGLPRTIYTNVSKRVLQMQRKIMRTWEEMRDQGDAIAAILTQRNSGRLMSKKQRFFKTWQPNAAENAGTEDAAQSRKLLKSLWHRDISAAKLIMYKGLCTLLDIPIHPALLRRPDDDGVPLNP

SEQ ID NO: 4272 - protein, 216 aa, Sitodiplosis mosellana
MLTNSKRCIINIGASQPPANSPIQIKKHVRCPGVRKLVKSFKKMEGNVIRFVNEARSSRLCARCFEPFPLSTLNDRVMIVVAKSKRKLRSDRKEMRQAAVLNPNQPRGFVSKVIGYRKNWQQNAANGMDDNVEERRGVIIHDAELSIIEYTDEFVPEDPVDDSPVLKTVWQRDISAAKLILFRGHCELFGHRLHDAFTRQHLVYPTWIRHANINIR

SEQ ID NO: 4273 - protein, 557 aa, Sitodiplosis mosellana
MKRYDATRGDADRLAKRDRLLLYVRDIRGPADDDIAKFTKDEDTWFASLPIWLMMQSEIETHLNWVEQHHDNIVQVIALPNIKNLVVIPICHHTRKAVRIYADVLYRMMCETGTIPRDEYGWQHSGSDVTLKSNQAYYFKMIFNMEKINRVLKANKKFEHILSDGVSASILYSVKITVVNKLVEDGLVRKRYSDGFYVYELGIDWGMKTWNATARRRINNDKERIHNGKEMNFTINSKKYHYGTGERVRKEKKERWTRAFGQFEESDRNNRARYDRMPSPKGSNWHDYIRHRLTIMKKAIAVLYTTKKYTRLSFDHYIESNRISDKVAATLTNRKRCIINIGASQPPANSPIKIKKHVRCPGVRKLVKSFKKMEGNVIRFVNEARSSRLCARCFEPFPLSTLNEWCMPDQEDWPDGMKLPEKIVAAKSKRKLRSDRREMRQAAVQNPNQPRGFVSKVICYRKNWQQNAANGMDDNVEERRGVINHGGGIIEYTDEYEPEDPVDDFSLLKTVWQRDISAAKLILYRGHCELFGHRLHDAFTRQHLLYLTRFRVNFNIH

SEQ ID NO: 4274 - protein, 940 aa, Sitodiplosis mosellana
MGYQRKKTRKKGKPIAVLGDVIKEDETEKDSGIRTIKTQLRAILRPEYRDLLIAAITDRSMMATKICALASQLFLSRCERAFDDNDKGFFEQNGEKVIRSSTIAIERRNLLIEMVTKNSWWDIPDNNIGLFTNGKDWFKSIAFWISLQRKIDDFNTCEEYREERRCQREEFQELKRCRRRNHRPCTCQQPVDRGQNGNEYIEKGPPRVKNLAVILICSFTRTHFTLDIRTLYFLLRQLEIVPLNITEDEFRKQKEYYWDQYFDMLKIYHLGRSRKEFRFRILSNGQAVSLQFNIDKTKMSNMEPDKKAIVQNYKKFVNEGATDPGVNTWNATTVHNIETGKEANYTISSKQYHYWTKQTVRNRQGKRWTKDFVKEERQDRENRAIYPVMPSPLGRHWKDYIRHRLKMTERGIAVYTTDKYTELNFDKYVRANSVTDSIAGMLTNHEPTLMHFGAAQMSPSSSIGIKKTLRCPGNRKMIRSYKKCRGCVVNMVDEYYTSQTCAKCFGRFDRRTKRHRFKVCHDCRPQLVEAMLPSMIVCKVNKRKMRQEKLKLFLLEKEAEEGNGNPAVGNDVPHPDQLNPELLPKVAIYHKIWHVNESSGILEYVKFNSAGKMEVVEPRVHKTTWHRDIAAAKCILIKDDQPSTRMRTARSHENIAAVSESVEDEPRTSVRRRSQQVGLSRMTTWRILTKDLGLHAYKIVLTQELEPMDHGKRRDFVEWVKGKEAADADFLKKVIFSDEAHFHLNGYVNRQNCRFLGSENPRETEEVSAHPARCTVWCGLWAGGIIGPYFFENDDGRAVSINGERYREMLQYFFWSEIEDMDLSDMWFQQDGDRPHTTPETLAVIEERFPNRIISQKAEVEWPPRSCDLTPLDYFLWGYVKDKVYANKPSTIAELKIEIRRVITTVNVPLLESVIENLGKRLKVCEKSRGGHLHDILFHT

SEQ ID NO: 4275 - protein, 799 aa, Sitodiplosis mosellana
MDKRFLYNLMQICSGYGEVYTHMHGATFNIVQYAREHSDEVLAMIDNDTDFLLFEGEYQYWSLADLDILRFQTKKYCSDMGYQRKKTRKKGKPIAVLGDLIKEDEKEKDSDIRTIKTQLRAILRPEYRDLLIAAITDRSMMATKICALASQLFLFRCERAFDDNDKGFFEQNDEKVIRSCFFGVLKKNIYKKKKMPPEFRKMVQQLDDSHRVVWPNADYFGNGMNDLIDPYVTNVKNNLKMHSKKRLREWLRVKVFESSLVARYEQADIDRVICLAIYGNDDIKINGMDDVAKRERRDLLIEMVTKNSWWDIPDNNIGLFTNGKDWFKSIAFWISLQRKIDDFNTCEEYREERRCQREEFQELKRCRRRNHRPCTCQQPVDRGQNGNEYIEKGPPRVKNLAVIPICSFTRTHFTLDIRTLYFLLRQLEIVSLNITEDEFRKQKEYYWDQYFDMLKIYHLGRHRKEFRFRILSNGQAVSLQFNIDKTKMSNMEPDKKAIVQNYKKFVNEGATDPGVNTWNATMVHNIETGKETNYTISSKQYHYWTKQTVRNRQGKRWTKDFVKEERQDRENCALYPVMPSPLGRHWKDYTRHRLKMTERGIAVYTTDKYTRLNFDKYVRANSVTDSIAGMLTNHQPTLMHFGAAQMSPSSPIGIKKTLRCPGNRKMIRSYKKCRGCVVNMVDEYYTSQTCAKCFGHFDRRTKRHRFKVCHDCRPAGVMLPSMIVCKVNKRKMRQEKLKLFLLEKEAEEGNGNPAVGNDVPHPDQLNPELLPKVAIYHKIWHVNESSKIMEYVKFPEVPM

SEQ ID NO: 4276 - protein, 690 aa, Sitodiplosis mosellana
MISHCLVEVEKIRSNSALNKCYGTTISHQNRSQRINQEETKPRGPRAELPRIDPEFKAIVEGLDDYHRIDWPNNKDFCNGLKHLTNQYTDNCHVGDDAEKFLPSDIASVVNLIVKQKDIKVPIRDPNKLERCSVLYDMVNDLNVFPEIDLHDLTTDPKHWFKAMPMYLSMQREIEEYNSEWPHQRRPKRKKRKRKKTKGKWKRKRSQMLDNPDFRPLIRNLVVVPMCDFRRTHFKIDCSSMHQVLSSQKLLPKVEIENKKGTTSTKTIQQKDFNHSRDYWWNQYFYMRKIRRFVRAKKQFDYSINTDGISVSLQYSAKKKTDNKEIDQKSRIIQKIEDGTIKNYSGVDTGVRSWNTTTTHDIETGKETNFVMSSKQFHWQTGQKVRNAKAKRWTKNFVEMERADRENRDLYPVMPSPKGSMWLNYIKHRVKMMKHGICAYSTAKYTRLALDKHIKSSSVVDEWVNKVTDKKPTLFFFGADGEIPPDSPISIKKHVRCPGVRKTLRSIKKRRDCFIQLVDEWGTSQTDARCMNRFQNQNKAARFKKCRCVPDARTLLPTKIVSKLGKTDLSIYRQLQRAMNEEALVGDERLFPKVKCYYKNWRLNLECSVIWHRDVVAAKNILLKGLWTLLGLPIPEAINRYWREAAEAAAAVAAAAAARATAEAAAAAVAIVDNDVEMFEYDQQPADHAV

SEQ ID NO: 4277 - protein, 1107 aa, Sitodiplosis mosellana
MLNDKRKILVSTGNILNVNKKAGQKTNEELFDCLNLTMSDPVVDAKAGIIARSNDDLLAKVKEYERNDIKIGAKVFLNHSDPNLLHEAIDSLLQVLKIDHLDNLILGFHPLDGAKSKTNGTDKTNGYQNGSLGSSLPKESLLTWGDTATAIDELKELWQVLETYADDKRICQLGIADLDTDTLIELYTSCRVKPTISQINLSACCVVPPSMQEFCAKNEIQLLTHSDSEDDHRHCTDANELIIVSDDDEENVENVDVNNVIQTLRDRLKKYLYYPNKQKCNDLSELNAHPQAATIIELNGTPDMHRNCERCGQLIRKHSNRMHSRQRTLCRTYGLSAKKKTRKKGKPIAVLGDVIKEDEKEKDSGIRTVKTQLRAILRPEYRDLLIAAITDKSIMATKICALASQLFLCRCERAFDDNDKAFFEKNGEKVIRSCFYGVLKKNIYKKDKMSPEFRKMVHELDDSHRVVWPNADYFGNGMNDLIDTYVTNVKNNLKTHSKKRLREWLRVKVFESSLVARYEQADIDRVISLAIFGNDDIKINGMDDVAKRERRNLLIEMVTKNSWWDIPDNNIGLFTNGKNWFKSIAFWISLQRKIDDFNTCEEYREERRCQREEFQELKRCRRRNHRPCTCQQPTDRGQNGNEYVEKGPPRVKNLAVIPICSFTRTHYTLDTRTLYFLLRQLEIVPLNITQDEFRKQKEYSWGQCFDMLKIYHLGRSRKEFRFRILSNGQAVSLQFDIDKTKMSNMESDKKAIVQNYKTFVNEGGTDPGVNTWNATTVHNIETGKETNYTISSKQYHYWTKQTVRNRQGKRWTKDFVKEERQDRENRALYPVMPSSLGRHWQDYIRHRLKMTERGIAVYTTDKYTRLNFDKYVRANSVTDSIAGMLTNHQPTLMHFGAAQMSPSSPIGIKKTLRCPGNRKMIRSYKKCRGCVVNMVDEYYTSQTCAKCFGRFDRRTKRHRFKVCHDCRPQLVEAMLPSMIVCKVNKRKMRQEKLKLFLLEKEAEEGNGNPAVGNDVPHPDQLNPELLPKVAIYHKIWHVNESSGILEYVKFNSAGEMEVVEPRVHKTKWHRDIAAAKCILIKGHCDLFGDELPETLQRPSNQRAAVNN

SEQ ID NO: 4278 - protein, 475 aa, Sitodiplosis mosellana
MVAVAIVAIAITSAFDGSAGDAFIIAVAAILIVDIIALTLSSPFSNNNNNNINNSFTFGSTLIQATDEETRNRLAEWFQGNGESFKPSIPAKGETKDEITAIKCALKTIIRPQFQQALMTKITDLSLQATSICVLGSLLFLFEVLWHNNKPPKPKSKYKPTGKKPRGPRAELPRIDPEFKAIVEGLDDYHRIDWPNNEHFSNGLKHLTNQYADNVVTNLKTHANKHITQYLKLKVFQWNSGLGDDAKKFLPSDIASAVNLIIKQKDIKVPIRDPDKLERCSVLYDMVNDLNTNFVMSSKQFHWQTGQKVRNVKEKRWTKKFVEMERADRENRELYPVMPSPKGSHWLNYIKHRVKMMKHGICAYSTAKYTRLALDKHIKSSSVVDKWVNKVTDKQPTVFLFGADGEIPPDSPISIKKHVRCPGVRLWTLLGLPIPEAINSYWREDREAVEAAAAVAAAVAAAAVAIVDNDVEMFE

SEQ ID NO: 4279 - protein, 229 aa, Sitodiplosis mosellana
MKFDCSILTDSVSVSLMYIKSNRTLDAKDLKTIEDMKTSRLLVLSFDKYVESTRASDKIAASLTNKKPSMINLGAVQMAPNSPIRIKRRLRCPGTRKLLASFAKLNNCTHIVRFVDEYFTSQTCAKCFGRFDSRTKRNRFKVCRQCWLNGYDGQILPNKIVTTLSNRELKKERREKEQERMQQNVNKNQPRRCEVFGYRIHPNLSRPVQHNEQNIDSDYEHISEDEDDE

SEQ ID NO: 4280 - protein, 246 aa, Sitodiplosis mosellana
MRTFIASVRLDLKTGEETNEKISFKQYHQKSKQDARNIKAERMTRVFTYDEQADLKRIAAEIGQTPSPRNISWRHYIEHRLRMSQDGIAAYSQKNYARLRLDKHIEWRRAIDLIAGKLVHFKTAIINIRAAKISPNCPIRIKKYVRCPGVRKLSAAFKRRGNCVVRLVDEYMTSQHCARCFKRFPIWTKSKRYKKCNDCQPDERVGLPRTIYTNVSKRVLQMQRKIVRTWEEMRDQGDAIAAILTK

SEQ ID NO: 4281 - protein, 480 aa, Sitodiplosis mosellana
MRVSYRRKMANRFKASIPAKGETKDEKITTIKCALKTIIRPQYQQALMSKITEPSVENNNFALFGGSGEDKIKLCFEQVLWHNNQPPKPKSKYKPRGEKPRGPRAELPRIDPEFKTIVECLDDYHRIDWANNKDFCNGLKHLTNQYNDNVVTNSKTHANKHITQYLYSAKKKTANKETDQKSRIIQKIEDGTIKNFSGVDTGVRSWNTTTTHDIETGKETNFVMSSKQFHWQTGQKVRNAKAKRWTKNFVEMERADRENRDLYPVMPSPKGSMWLNYIKHRVKMMKHGICAYSTAKYTRLALDKHIKSSSVVDEWVNKVTDKKPTLFFFGADGEIPPDSRISIKKHVRCPGVRLTLRSIKKRRNCFIQLVDEWGTSQTDARCMNRFENQRKDARFKRCRCVPDARTLLPTKIVSKLSKTDLSIYRQLQRAMNEEASEEDECLFPKVKCYYKNWRLNLECSVIWHRDVVAAKNILLKGKAN

SEQ ID NO: 4282 - protein, 476 aa, Sitodiplosis mosellana
MRVSYRRKMANRFKASIPAKGETKDEKITTIKCALKTIIRPQYQQALMSKITEPSVENNNFALFGGSGEDKIKLCFEQVLWHNNQPPKPKSKYKPRGEKPRGPRAELPRIDPEFKTIVECLDDYHRIDWANNKDFCNGLKHLTNQYNDNVVTNSKTHANKHITQYLYSAKKKTANKETDQKSRIIQKIEDGTIKNFSGVDTGVRSWNTTTTHDIETGKETNFVMSSKQFHWQTGQKVRNAKAKRWTKNFVEMERADRENRDLYPVMPSPKGSMWLNYIKHRVKMMKHGICAYSTAKYTRLALDKHIKSSSVVDEWVNKVTDKKPTLFFFGADGEIPPDSRISIKKHVRCPGVRLTLRSIKKRRNCFIQLVDEWGTSQTDARCMNRFENQRKDARFKRCRCVPDARTLLPTKIVSKLSKTDLSIYRQLQRAMNEEASEEDECLFPKVKCYYKNWRLNLECSVIWHRDVVAAKNILLK

SEQ ID NO: 4283 - protein, 584 aa, Sitodiplosis mosellana
MRAFLRMRCFEFNHGRLRYRKPANVGIFDETDVKNTTKFLVNQRDWTHGNADRYRKMQFLLSEVVRIGGPADNNLKEFVTKKWFASLHMWIKIQRNISYFHTTYGILNSDWVKYKSDRVTNKMPLVPRPPKVKNFIAIPVHDFDLKHIRIDVKHFYEIARGLGALKHAIGKSGRKVCIRVFSASFNRKMWWKHVFNMKKINKIGGRKMKFDCSIMTDSVSVSLMYIKSNRTLDAKDLKTIEDMYREGRFVYELGIDPGVRTWNATVRRTVATGDEENITIAGPTYHWRAKRSKLVPSPKSKDAWKSYICHRLTMMALGIAVFGTRKYARLSFDKYVESTRASDKIAASLTNKKPSMIYLGAAQMAPNSPIGIKRRLRCPGTRKLLASFKKLNNCTVRFVDEYFTSQTCAKCFGRFDPRTKRNRFKVCRQCWLNGYDGQILPNKIVTTLSNRELKKECREKKQERMQQNVNNNQPRNAANPTRPAKTRLVSKLCKYYKCHTNEAGDLEWYDWHVNQEVTNWHRDVVAAKCILYKDGFDYVDVESLIDCVICFSSYCDVEDVDIVMNDPKSMNCYYSMIWKKMIET

SEQ ID NO: 4284 - protein, 714 aa, Sitodiplosis mosellana
MPKRKGTPLRGNQRKKKKIVSKTGIEGEIGILAIKMTLKAIVRPQYYQQVKDWFTQKSIECTKICALASLLFLYKVKSANESNNADFFSGDGNKEIKDCFYAVLQKNKEKEEMVPDFRDFVENMEAENRFSWPGNSFFGNQMQYLYKQYTTNLRNNLEMHAERRLYQYLIMRAWQFNAVSTGLTLRNDDIKRAVQWTIDRYDPIKTTDRHWEVKWEKRQLLLDMIAEIGGPEDNDVAIYTTSEGTWFKSINMWLTMQMEVDNFHIWAEENGIEIPKIKNLKVIPIHQFMRQHVKMETDVLIRMMSEMRFRLHGLIIRYEIVEDPMTQCWDEIFDMPKIHRLLKSNKRFRPYIASNGQAVSIMYEVPKSHLDRLVDDEIVRKRYRDGVYVYEIGIDPGMRTWNATVRRNIKTGKEINFTVSSKRYHYLARQGVRDRKAKRWTRRFVAEEQHDRERYQRMPSPKGENWGSYIAHRLTMLKKGIETYTTEKYAHLQFDKYIQSNRATDKIANLLTNRKPSIIHMGAVDMPTNSPIRIKKHVRCPGNRKLAKSFRKIPNTVVRQVNENRTSQLCGRCFTPFDIATQRDRMKVCEWCLPDNDDWPPNLQLPTKIVSKKSKRTLIADRQRMREAVEQDPNQAERFVSKVISYQKNWQQSAAIDEDADPAEQEDAAESHDRRILKTCWHRDITAAKLILYKGHCHLFGIQLHFMFTIERIR

SEQ ID NO: 4285 - protein, 821 aa, Sitodiplosis mosellana
MGFVLSVAVSFPLVVFPCRASLYSLLYHRSHSEIAHYIPEHRFKYITISMVLVALIIGILIPSIELIIGLVGSTIGVAICIMFPASCFIKINKKNSTERLAAQLFIMARGACGARGGSDERFTTVKLALRTIIQKPYRLILTTVIGEMSIMATLISLLVSLYFLYLVNTAVDEFNNDFFNSNGDEIIKMCFQGVLRQNYTNDRMFMAPGFRQIVIKILGEWFPWPTNRFFGNTFKYLYEQYATNVKTNLKTHCEKRLRKFFKMRCYELNHMFLSGKIQLDELFDGDDIKNAINYTYNRRDSTRGNANAIRKLEILLAELYWIGAPYRPDDPHPFNIIEFVELNWFQALRMFINIQRDIHNFHLAFANLRQSWNLFRKYPLYVQQPEFPEPPEITTFTVIPKCTFQRWHVKIDTDSLYNILKGINAMPRTKGTRVLRNGEYQQHWISQTEFKERGGWRLFFNMDEIIKLVKNKKEFGDSIISDGEFAYALGIDPGMRTFIASVRLDLKTGEETNEKISFKQYHLKSKQDARNIKAERMTRVFTYDEQADLKRIAAEIGQTPSPRNISWRHYIEHRLRMSQDGIAAYSQKNYARLRLDKHIEWRRAIELIAGKLVHFKTAIINIGAAEISPNCPIRIKKYVRCPGVRKLIAAFKRRGNCVVRLVDEYMTSQHCARCFKRFPIWTKSKRYKKCNDCQPDERVGLPRTIYTNVSKRVLQMQRKIMRTWEEMRDQGDAIAAILTQRNSGRLVSKKQRFFKTWQPNAAENAGTEDAAQSRKLLKSIWHRDISAAKLIMYKGLCTLLDIPIHPALLRRPDDDGVPLNP

SEQ ID NO: 4286 - protein, 655 aa, Sitodiplosis mosellana
MAQQSATKTEVKAIVEGLDDYHRIDWPNNKDFCNGLKHLTNQYTDNVVTNLETHANKHITQYLKLKVFQWNSDVGDDAEKFLPSDIASVVNLIIKQKDIKVPIRDPNKLERCSVLYDMVNDLNVFPEIDLHDLTTDPKHWFKAMPMYLSVQREIEEYNSEWPHQRRPKRKKRKRKKTKGKWKRKRSQMLDNPDFQPLIRNLVVVPMCDFRRTHFKIDCSSMHQVLSSQKLLPKVEIENKKGTTSTKTIQQKDFNHSRDYWWNQYFYMRKIRRFVRAKKQFDYSINTDGISVSLQYSAKKKTDNKEIDQKSRIIQKIEDGTIKNYSGVDSGVRSWNTTTTHDIETGKETNFVMSSKQFHWQTGQKVRNAKAKRWTKNFVEMERADRENRDLYPVMPSPKGSMWLNYIKHRVKMMKHGICAYSTAKYTRLALDKHIKSSSVVDEWVNKVTDKKPTLFFFGADGEIPPDSPISIKKHVRCPGVRKTLRSIKKRRDCFIQLVDEWGTSQTDARCMNRFQNQNKAARFKKCRCVPDARTLLPTKIVSKLGKTDLSIYRQLQRAMNEEALVGDERLFPKVKCYYKNWRLNLECSVIWHRDVVAAKNILLKGLWTLLGLPIQRRSIGIGAKLLKQPLLLPLLLPLEQPLKQPLLLSPSWIMM

SEQ ID NO: 4287 - protein, 749 aa, Sitodiplosis mosellana
MHLASMLMLYTINEAFDDGNLDFFVNQNGVNLITGCFNCVTSDNINDPLTAQMPDAFLAMVTQGSPNFEWPRRHQMTRQVYALKDQYVANVKTNLETHCWVRLTHFLRVKCHEFNHKGSPLDVIYNASYLPFDDIDIRNTMKNLMYNEDWTYDDDESRKSKMEILFKEVSQLCGPSFVKYFTMYEYIQKDWFESLWMWMGMQRIVEKFSIDTAHLREQWKAYDRDPVKNREPSVPKIPKVKNFAAIPLSDTKLKHTPFDHKDLIDIVGQLKNERGWDIRADYRTYYKQGENKDEAWGIVFDMDKIRRLRTGSKEFYHKIQTNSSAVSVLFSRPKRKGAGVTLEQIKAKYEKPVSKGGYMYESGIDPDQKTKMACVRRTLATGTETNIKLSSIQYHWGARQGMRDKQAKKMTSKYVHKEQRDLKSYPIASVSPRGSQWKSFIKHKIKMLTDSLATYARRKYAQLSLHKYIESNREMDLMAKHITKNETGVVFLGDAAFPSNSKIGVKRTKRTPDQRKFIVSLKKNGKTDVVLTPEPYTSQTCANCLRRFPRSTKSDRFKVCKDCRPHKDVGLPPVIVTDRSRRRKQRDRKQNASQKPTANVTRAERAEKHREKRRSERESHNPEQLDTEQAVRRYNRRIRRRELRQRRRVAGHRSRKVTKQPEAESDLPGFDKIGDTSICKIRVKNRKAKPQLWQRIHYDATDKGIGDLGSKKILFQKNWHSSPMNDQNAFTVTWHRDICAAKCILCRGM

SEQ ID NO: 4288 - protein, 714 aa, Sitodiplosis mosellana
MPKRKGTHLRGNQRKKKKIVSKTGIEGEIGILAIKMTLKAIVRPQYYQQVKDWFTQKSIECTKICALASLLFLYKVKSANESNNADFFSGDGNKEIKDCFYAVLQKNKEKEEMVPDFRDFVENMEAENRFSWPGNSFFGNQMQYLYKQYTTNLRNNLEMHAERRLYQYLIMRAWQFNAVSTGLTLRNDDIKRAVQWTIDRYDPIKTTDRHWEVKWEKRQLLLDMIAEIGGPEDNDVAIYTTSEGTWFKSINMWLTMQMEVDNFHIWAEENGIEIPKIKNLKVIPIHQFMRQHVKMETDVLIRMMSEMRFRLHGLIIRYEIVEDPMTQCWDEIFDMPKIHRLLKSNKRFRPYIASNGQAVSIMYEVPKSHLDRLVDDEIVRKRYRDGVYVYEIGIDPGMRTWNATVRRNIKTGKEINFTVSSKRYHYLARQGVRDRKAKRWTRRFVAEEQHDRERYQRMPSPKGENWGSYIAHRLTMLKKGIETYTTEKYARLQFDKYIQSNRATDKIANLLTNRKPSIIHMGAVDMPATSPIRIKKHVRCPGNRKLAKSFRKIPNTVVRQVNENRTSQLCGRCFTPFDIATQRDRMKVCEWCLPDNDDWPPNLQLPTKIVSKKSKRTLIADRQRMREAVEQDPNQAERFVSKVISYQKNWQQSAAIDEDADPAEQEDAAESHDRRILKTCWHRDITAAKLILYKGHCHLFGIQLHFMFTIERIR

SEQ ID NO: 4289 - protein, 1238 aa, Sitodiplosis mosellana
MTVVSKYLDEAIVRYEKMGFSKHALSKGIVTIAVGAYVAHISYPYLSKMIKAANLAPVLSETASTTDDDTSDSDFDSESDDYESAIESNNINSNRIDRKNIDATLPDGTTKLDGDDNLDNDETAQGVETDTGDRLTVPTGKRKRKHSKVIKQQIKQAEKFLAQATQERKKSEQVGNLSFSQLEERRIGHLTKPCFDLMLIGLALMRSSRKMKANIVTGPALAFVVISATALILRQLSPKFGQLVAEEATRYGYLRHVHARVITNAEEIAFYGGQRVELMQLREAFRRLANQMNIIYTQRLWFVMLEQFFMKYVWSGTGMIMISLPVLMGNQNQPHNSALSTATTVSDDGISDRTQYLTTARNLLISGADAIERLMSSYKEIVALAGYTYRVAGMLEVFDDTAHGRYNKVMMAEGRNNAGIIEFRNGQPVTKGRIIVNTDPNDRSISLNNVPVVTPNCDIVVPSLTLRIEPGMHLLITGPNGCGKSSLFRIVNGLWPIYGGELYIPKPIVGKPSMFYIPQRPYLTIGNLRDQIIYPDTVDDMLSKKYDEDMLHDIMKTVSLEHIVARPQYALLDECTSAVSIDVESSIYEAAKMAGITLLTITHRPTLCRTMANRFKPSIPAEGETKDEITTIKCALKTIIRPQYQQALMSKITDLSVENNDFALFGGSGEDKIKLCFEQVLWHNNQPPKPKSTYKPRGEKPRGPRAELPRIDPEFKAIVEGLDDYHRIDWPNNKDFCNGLKHLTNQYTDNVVTNLETHANKHITQYLVLKVFELNSNLEEDGEKFLPSDIASVVNLIIKQKDIKVPIRDPDKLVRCEVLYDIVRDCNVFPEIDLHDLTTDPKHWYKAMPMYISMQREIEEYHYSAKKKTDNKEIDQKSRIIQKIEDGTIKNYSGVDTGVRSWNTTTTHDIETGKETNFVMSSKQFHWQTGQKVRNAKAKRWTKNFVEMERADRENRDLYPVMPSPKGSMWLNYIKHRVKMMKHGICAYSTAKYTRLALDKHIKSSSVVDEWVNKVTDKKPTLFFFGADGEIPPDSPISIKKHVRCPGVRKTLRSIKKRRDCFIQLVDEWGTSQTDARCMNRFQNQNKAARFKKCRCVPDARTLLPTKIVSKLGKTDLSIYRQLQRAMNEEALVGDERLFPKVKCYYKNWRLNLECSVIWHRDVVAAKNILLKGLWTLLGLPIPEAINRYWREAAEAAAAVAAAAAARATAEAAAAAVAIVDNDVEMFENDQQPADHAV

SEQ ID NO: 4290 - protein, 416 aa, Sitodiplosis mosellana
MSQTSRPTSKLSFELDELFDGDDIKNAINYTYNRRDSTRGNTHAIQKLEILLAELYWIGAPYRSDDPHPFNIKEFVELNWFQALRMFVNIQCDIHNFHLAFANLRQSWNLFRKYPLYVQEPEFPEPPEITTFTVILKCTFQRRHVKIDTDSLYNILCGIKAMKREDGLRVNKKVEVLQRYIRPDEFKRIGSWRLFFDMDEINKLVKNKKEFGDSIISDGEFAYALGIDPCMRTFIASFRLDLKTGEETNEKISSKQYHLKSKQDARNIKAERMTRVFTYDEQADLKRIAAEIGQTPSPWNISWRHYIEHRLRMSQDGIAAYSQKNYARLRLDKHIEWRRAIDLIAGKLVHFKTAIINIGAAEISPNCPIRIKKYVRCPGVRKLIAAFKRRGNCVVRLVDEYMTSQHCARCFKRFPI

SEQ ID NO: 4291 - protein, 407 aa, Sitodiplosis mosellana
MDKIQKVGNRKTFDYTIVTDSVAVSLCFLKPECPSHEYSHEQINEMYENGVFRFVLGMDPGVRTWNATVRKHIASGVEENITIDGPKYHFRAKYGKRKRKSEKWLRLFTELEQHDRNQYPFYPSPKGASNWMSYIEHRVKMLQPGMEVYTARKYIRLNLDKHIEETRASDTIAAFLTRKLPSLIFLGAAQMAPNSPIGIKKRLRCPGVRKLLNSFKKLHNCVVVMVDEFKTSQTCAKCFRPFDRRTRNDRYKVCRQCIPHAANITTDKHLSSVIISKKSNRSYQRERRHVVAEYERLNVHPVYSHGLVPKLNVWFKNWQLNTDNTWNDSRHPHQQNTVWHRDEVAAKCILYKGLCMIKGLDVHPQLSRQHHAAAAAPHNNAEGDQDDNDSDSDDDYVYVLDDVSDEE

SEQ ID NO: 4292 - protein, 1702 aa, Sitodiplosis mosellana
MATKICALASQLFLFRCERAFDDNDKGFFEQNGEKVIRSCFFGVLKKNIYKKKKMPPEFRKMVHQLDDSHRVVWPNADYFGNGMNDLIDPYVTNVKNNLKTHSKKRLREWLRVKVFESSLVARYEQADIDRVISLAIFGNDDITINGMDDVAKRERRTLLIGMVTKNSWWDIPDNNIGRFTNGKDWFKSIAFWISLQRKIDDFNTCEEYREERRCQREEFEELKRCRRRNHRPCTCQQPVDRGQNGNEYIEKGPPRVKNLAVIPICSFTRTHYTLDIRTLYWLLRQLEIVPINITEDEFREQKEYYWDQYFDMRKIYHLGRSRKKFRFRILSNGQAVSLKFDIDKTKLKPVDKKAIVQNYNKFVNEGATDPGVNTWNATTVHNIETGKEANYTISSKQYHYWTKQTVRNRQGKRWTKDFVKEERQDRENRALYPVMPSPLGRHWGDYIRHRLKMTERGIAVYTTDKYTRLNFDKFVRSNSVTDSIAGMLTNHQPTLMHFGAAQMSPSSPIGIKKSLRCPGNRKMIRSYKKCRGCVVNMVDEYYTSQTCAKCFGRFDRRTKRHHFKVCHDCRPQLVRAMLPSMIVCKVNKRKMRQEKLKLFLLEKEAEEGNGNPAVGNDVPHPDQLNPELLPKVAIYHKTWHVNESSGILEYVKFNSAGKMEVVEPRVHKTTWHRDIAAAKCILIKASQATSTTARPSPAWLITSQPSVWGTSTIRYPTTARIRDLDSLSTVDSIVNSNKNDTSSLSVSTTNRNNENASVAAVTKSIYNSNHNIPINLGANTPMSSSTFSAPPLKTIVNSDDESMVGGGGGGGDGDDDRTDDLNSQQDFGSTGKSTGGVNTINNAGAYNDDTNGLYCGSTTARNLFWNYTRVGDINVQPCPPGSTGIAKWRCSGTLLPTATKSQKSSSRNNPSADDTNDNHMDDDPLYASNTERGYMWQPSTPDLTQCRSLWLNSLEVRVNQRDSALVSIANDLSQVTNSKTLYGGDMLVTTKIIQSLCEKMTYDIETFSDQRQRESVVLELLNSVVKTGSNLLDETQQYSWMDLSFEDQMRVATSLLTGLEDNAFLLADTIAAERNVVQKVKNILLSVRVLETRNIISNQVFPDHSIEQDSNSEDSIELPRGALLENSEGGLVRIVFVAFDRLESILRPLDSGNEPKSYDSVGNEETIGPSEYAPVTTKESVNTTQSQQPRVRILNSKVISASLGKGRHIQLSQPIRLILKHLQTDNVTNPTCVFWNYIDHAWSEDGCHIDQTNRTHTICMCNHLTNFAILMDVIDDTAQFSIQIGLFDENMRILISISIAICIVFVVIALLTLKFFNGIFMKIRREYQKFVQDSWLPQCLQCVVTVDEDQPTASPANNALSANVLLPASNTSTKKKNGPVDAADVTGTFLTVSPAHHPHGQTSTLMRHHQMQRHNAMPPYSGTLREHRSGTMTPAGSSKYAGGGQKYQYDFQNPELIYPHSANSQQFHQLHADDHAKMMYYDRKMGNSSKTLKSQGSSSTQQMLSSPMKHDYSYWTGTADPTSYQLNKLSRHPNEVDPMSGGGVGSGEMMHAQGQYPSYRKKMMQQYQQQTAANPHSPSHPNMRGTFGSTGDFQGRGDNRNSWVQNANPNVRHGRQHHQQQQQMNPADAQNYNSYADEEPVYEEIMSRTTENCDGSDLNEYPHSPTRDSDNLLQNMRIANTNSTHKMDTTSAQQQQPLHSR

SEQ ID NO: 4293 - protein, 898 aa, Sitodiplosis mosellana
MGAHAIRGNRSKPRKVEDGKQKEEKAYFAIKLAAASIVRPEYRDRILPWITKTSIKCTEISELASLLFLNKVRAATEQAIITGNWEYFDDGDGMHIIENCFYAVLRRYKEDDFIMDPWFRHCFENVDIENRSAWPNNDYFGNLMKYLFQQYGRNVKTNLDTHAQKRLRYFLRLKAFRQNYTNRIRGLPDTYDERDVANAVSWAIKRYDATRGDANRLAKRDRLLRYVRDIRGPADDDIAKFTKDEDTWFASLPMWLIMQSEIETHLNWVEQHHDNIVQVIALPNIKNLVVIPICHHTRKAVRIDADVLYRMMCETGTIPRDEYGRQHTVGHVTSKSNQANYFNMIFNMEKINRVLKANKKFEHILSDGVSASILYSVKKTVVDKLVEDGLVRKRYSDGFYVYELGIDWGMKTWNATVRRRINNDKERIHNGKEMNFTINSKKYHYGTAEGVRKEKRERWTRAFGQFEESDRNNRARYDRMPSPKGSNWRDYIRHRLTIMKKAIAVYTTKKYTRLSFDHYIESNRVSDKVAAMLTNRKRCIINIGASQPPANSPIQIKKHVRCPGVRKLVKSFKKMEGNVIRFVNEARSSRLCARCFEPFPLSTLNDRVKVCEWCMPDQDDWPDGMKLPEKIVAAKSKRKLRSERRAMRQAAVQNPNQPRGFVSKVICYRKNWQQNAANGMDDNVEERRGVIIHDAELGIIEYTDEYVPEDPVDDSPVLKTVWQRDISAAKLILYRADVDPAAEFLAREKDQLAGLGDDVIPAASESNASDDAPVNSAAPVVREEPEKIKKWREEQQKRLEEKDKEEEKKKLELREQAKKELEDWYKHHEEAIGKTKASNRNAEKQFVAETAEIEPGTEWERIAKLCDFNPKSSKSSRDVSRMRSIILQLKQTPLTSNA

SEQ ID NO: 4294 - protein, 319 aa, Sitodiplosis mosellana
MSSKQFHWQTGQKVRNAKAKRWTKNFVEMERADRENRELYPVMPSPKGSMWLNYIKHRVKMMKHGICAYSTAKYTRLALDKHIKSSSVVDEWVNKVTDKKPTLFFFGADGEIPPDSPISIKKHVRYPGVRKTLRSIKKRRNCFIQLVDEWGTSQTDARCMHRFEKQDKAARFKKCRCVPDARTLLPTKIVSKLGKTDLSIYRQLQRAMNEEASEEDECLFPKVKCYYKNWRLNLECSVIWHRDVVAAKNILLKGLWTLLGLPIPGAINRYWREAAEAAAAAAARATAEATAEAAAAAVAIVDNDVEMFEYDQQPADHAV

SEQ ID NO: 4295 - protein, 714 aa, Sitodiplosis mosellana
MKRKRAQNGRPGSVKLSLNSVLRDQYRANFVAQVTNWCHTATVITVLASLLFLFENNRAFDEDNHDFFRGNGYELIKDCFKNILNENRHKLPLAFRQIIETAVPNFRWPQREGMHNAFNQLIDQYTTNVKNNIKTYSYTRIKTFFVLQRYELNLLGHNISDIDVKNATKAVMFNNIVPSANVSSKLCDLVRGSWFQTIPIFITIQRLVFNHHERFELLNDLWRRYHRDRLHNAMPSIARPPKIKNFRVIPIHDFKMKHIRIDIHLFYQMARKLGAIKLAKGLFGQPVNISKKVYDSNPFVSWDTIFNMDKIKKVGNRKTFDYAIVTDSVAVSLCFLKPECPSHEYSHEQINEMYENGVFRFVLGMDPGVRTWNATVRKHIASGVEENITIDGPKYHFRAKYGKRKRKSEKWLRLFTELEQHDRNQYPFYPSPKGASNWMSYIEHRVKMLQPGMEVYTARKYIRLNLDKHIEETRASDTIAAFLTRKLPSLIFLGAAQMAPNSPIGIKKRLRCPGVRKLLNSFKKLHNCVVVMVDEYKTSQTCAKCFQPFDRRTRKDRYKVCRQCIPHAANITTDKHLSSVIISKKSNRLYQRERRHVVAEYERLNVDSVYSHGLVPKLNVWFKNWQLNIDNTWNDSRHPHQQNTVWHRDKVAAKCILYKGLCMIKGLDVHPQLSRQHHAAAAAAQNNAEGDQDDNDSDSDDDYVYVLDDVSDEE

SEQ ID NO: 4296 - protein, 678 aa, Sitodiplosis mosellana
MQSAQKQIAANGQQVNTAVDDFNNDFFNSDGDEIIKMCFQGVLRQNYTNDRMFMVPGFRQMVVNILGEWFPWPTNRFFGNTFKYLYEQYSKNVQTNLKTHCEQRLRKFFKMRCYELNHMCLCGDLELDELFDGDDIKNAINYTYNRRDSTRGNANAIRKLEILLAELYWIGAPHRPDDPHPFNIKEFVELNWFQALRMFINIQRDIHNFHLSFANLRQSWNLFRKYPLYVQQPEFPEPPEITTFTVIPKCTFQRRHVKIDTDALHNILCGIKAMPRTKGTRVLRNGEYQQRWISQIEFKERGGWRLFFNMDEIIKLVKNKKEFGDSIISDGVSASVLFKLPKQSKTVADEDEAETKRKYFAGEFAYALGIDPGMRTFIASVRLDLNTGEETNEKISFKQYHQKSKQDARNIKAERMTRVFTYDEQADLKRIAAEIGQTPSPRNISWRHYIEHRLRMSQDGIAAYSQKNYARLRLDKHIEWRRAIDLIAGKLVHFKTAIINIGAAEISPNCPIRIKKYVRCPGVCKVIAAFKRRGNCVVRLVDEYMTSQHCARCFKRFPIWTKSKRYKKCNDCQPDERVGLPRTIYTNVSKRVLQMQRKIMRTWEEMRDQGDAIAAILTQRNSGRLVSREATLLQNLATKCCCKRWNRRRCTITQVTQITLASGHISSQTDHVQRLIIY

SEQ ID NO: 4297 - protein, 745 aa, Sitodiplosis mosellana
MTGWAIAIDPCAIVRCAAGAVCVADKGVENNDFALFGGSGEDKIKLCFEQVLWHNNQPPKPKSTYKPRGEKPRGPRAELPRIDPEFKAIVEGLDDYHRIDWPNNKDFCNGLKHLTNQYTDNVVTNLKTHANKHITQYLKLKVFRWNSDVGDDAEKFLPSDIASVVNLIIKQKDIKVPIRDPDKLVRCEVLYDIVRDCNVFPEIDLHDLTTDPKHWYKAMPMYLSMQREIEEYNSEWPHQRRPKRKKRKRKKTKGKWKRKRRQMLDNPDFRPLIRNLVVVPMCDFRRTHFKIDCSSMHQVLSSQKLLPKVEIENKKGTTSTKTIQQKDFNHSRDYWWNQYFYMRKIRRFVRAKKQFDYSINTDGISVSLQYSAKKKTDNKEIDQKSRIIQKIEDGTIKNYSGVDTGVRSWNTTTTHDIETGKETNFVMSSKQFHWQTGQKVRNAKAKRWTKNFVEMERADRENRDLYPVMPSPKGSMWLNYIKHRVKMMKHGICAYSTAKYTRLALDKHIKSSSVVDEWVNKVTDKKPTLFFFGADGEIPPDSPISIKKHVRCPGVRKTLRSIKKRRDCFIQLVDEWGTSQTDARCMNRFQNQNKAARFKKCRCVPDARTLLPTKIVSKLGKTDLSIYRQLQRAMNEEALVGDERLFPKVKCYYKNWRLNLECSVIWHRDVVAAKNILLKGLWTLLGLPIPEAINRYWREAAEAAAAVAAAAAARATAEAAAAAVAIVDNDVEMFENDQQPADHAV

SEQ ID NO: 4298 - protein, 968 aa, Sitodiplosis mosellana
MRKSIHSVAELLIKRYLLIALVVGAIAVGLDSYAYDRFIVTPFEFFKLNVLEEVGSFYGTQPWHWYFIVGLPTILGLVTIPFFFAVVQTLQNREVYPDRFNLLIATLFTLIVYSALPHKEFRFILPLLPICLHITADSMKNWSRDASRITIWIVAMLLLISNAIPAVYLSWVHQRGTIDVMLPIERIAREFRDTDGNQAKFFRTMANRFKPSIPAEGETKDEITTIKCALKTIIRPQYQQALMSKITDLSVENNDFALFGGSGEDKIKLCFEQVLWRNNQPPKPKSRYKPSGTKPRGPRAELPRIDPEFKAIVEGLDDYHRIDWPNNKDFSNGFKHLTNQYADNVVTNLTTHANKHITQYLKLKVFQWNSGVGDDAEKFLPSDIASVVNLIIKQKDIKVPIRDPNKLERCSVLYDMVNDLNVFPDIDLHDLTTGKQHWFKAMPMYLSMQREIEEYNSEWPHQRRPKRKKRKRKKTKGKWKRKRSQMLDNPDFRPLIRNLVVVPMCDFRRTHFKIDCTSMRQVLSSQKLLPKVEIENKKGTTSTTIIPEKDFNRDRDYWWNQYFYMRKIRRFVRAKKQFDFSINTDGISVSLQYSAKKKTVNKEIDQKSHIIRKIKDGTIKNYSGVDSGVRSWNTTTTHDIETGKETNFVMSSKQFHWQTGQKVRNAKAKRWTKNFVEMERADRENRELYPVMPSPKGSMWLNYIKHRVKMMKHGICAYSTAKYTRLALDKHIKSSSVVDEWVNKVTDKKPTLFFFGADGEIPPDSPISIKKHVRCPGVRKTLRSIKKRRDCFIQLVDEWGTSQTDARCMNRFQNQNKAARFKKCRCVPDARTLLPTKIVSKLGKTDLSIYRQLQRAMNEEALVGDERLFPKVKCYYKNWRLNLECSVIWHRDVVAAKNILLKGLWTLLGLPIPEAINRYWREAAEAAAAVAAAAAARATAEAAAAAVAIVDNDVEMFENDQQPADHAV

SEQ ID NO: 4299 - protein, 772 aa, Sitodiplosis mosellana
MGGKRIGAHAIRGNRSKPRKVEDGKQKEEKAYFAIKLAATSIVRPEYRDRILPWITKTSIKCTEISELASLLFLNKVRAATEQAIITGNWEYFVDGDGMHIIENCFYAVLRRYKEDDFIMDPWFRHCFENVDIENRSAWPNNDYFGNLMKYLFQQYGRNVKTNLDTHAQKRLRYFLRLKAFRQNYTNRIRGLPDTYDERDVANAVSWAIKRYDATRGDANRLAKRDRLLRYVRDIRGPADDDIAKFTKDEDTWFASLPMWLIMQSEIETHLNWVEQHHDNIVQVIALPNIKNLVVIPICHHTRKAVRIDADVLYRMMCGTGTIPRDEYGRQHSGSDVTSKSNQAYYFNMIFNMEKINRVLKANKKFEHILSDGVSASILYTVKKTVVDKLVEDGLVRKRYSDGFYVYELGIDWGMKTWNATVRRRINNDKERIHNGKEMNFTINSKKYHYGTGEGVRKEKRERWTRAFGQFEESDRNNRVRYDRMPSPKGSNWRDYIRHRLTIMKKAIAVYTTKKYTRLSFDHYIESNRINDKVAAMLTNRKRCIINIGASQPAANSPIKIKKHVRCPGVRKLVKSFKKMEGNVIRFVNEARSSRLCARCFEPFPLSTLNDRVKVCEWCMPDQDDWPDGMKLPEKIVAAKSKRKLRSERRAMRQAAVPNPNQPRGFVSKVICYRKNWQQNAANGMDDNVEERRGVIIHDAELGIIEYTDEYVPEDPVDDSPVLKTVWQRDISAAKLILYRGHCELFGHRLHDAFTRQHLVYPTRFRVNFNIH

SEQ ID NO: 4300 - protein, 465 aa, Anadara kagoshimensis
MWEATISCKPPVDWWNGNLRIKTLETDKNGKGESYNIHVGDNDDDNEEFLTTYMVGLQPDVDQRRVLNEMIRVSNHAYNLCIHLVKNKGVKPSQKELQKIVVKTNAKDVDSKHRLDGDDWFFENKMSTIKLTACREYSQKYSIGAKKKKKLGTDKFLPTKEKGETENEITGSVGVQKLYVNKLTEKHKKRFPTHREDKHLMIFPVSLIRPIRLTKSVRKLPPFDHDMRIIKRADGYFILCIPCKPEYTRRKFNKEGQKGVCGVDPGGRTMATIYDPVNRHAWQVGTKRDKKYLIKPLQKKIDVVMAQLQLAIEKEQKSRIMDKKRELKKLHTKMKWIINNIHCDFSNELVKTNKLVVLGDMKTAKIVNKTEKKGLPRKANRDLIEWRHYEFKKRLIHRAKGSGCKVVIQDEAYTSKTCGRCGRMNANLGSAETFVCDTCKYETHRDVNGARNILRKYTKHFFTYK

SEQ ID NO: 4301 - protein, 465 aa, Anadara kagoshimensis
MWEATISCKPPVDWWNGNLRIKTLETDKNGKGESYNIHVGDNDDDNEEFLTTYMVGLQPDVDQRRVLNEMIRVSNHAYNLCIHLVKNKGVKPSQKELQKIVVKTNTKDVDSKHRLDGDDWFFENKMSTIKLTACREYSQKYSIGAKKKKKLGTDKFLPTKEKGETENEITGSVGVQKSYVNKLTEKHKKRFPTHREDKHLMIFPVSLIRPIRLTKSVRKLPPFDHDMRIIKRADGYFILCIPCKPEYTRRKFNKEGRKGVCGVDPGGRTMATIYDPVNRHAWQVGTKRDKKYLIKPLQKKIDVVMAQLQLAIEKEQKSRIMDKKRELKKLHTKMKWIINNIHCDFSNELVKTNKLVVLGDMKTAKIVNKTEKKGLPRKANRDLIEWRHYEFKKRLIHRAKGSGCKVVIQDEAYTSKTCGRCGRMNANLGSAETFVCDTCKYETHRDVNGARNILRKYTKHFFTYK

SEQ ID NO: 4302 - protein, 239 aa, Anadara kagoshimensis
MRIIKRADGYFILCIPCKPEYTRRKFNKEGRKGVCGVDPGGRTMATIYDPVNRHAWQVGTKRDKKYLIKPLQKKIDVVMAQLQLAIEKEQKSRIMNKKRELKKLHTKMKWIINNIHCDFSNELVKTNKLVVLGDMKTAKIVNKTEKKGLPRKANRDLIEWRHYEFKKRLIHRAKGSGCKVVIQDEAYTSKTCGRCGRMNANLGSAETFVCDTCKYETHRDVNGARNILRKYTKHFFTYK

SEQ ID NO: 4303 - protein, 389 aa, Spodoptera exigua
MQILKAYKFRLEPTEQQAQRLRQLCGCARYVWNHGLAETKSILDSGEKIPSAFELNRMLTCWKKDPEMAFLGEAYTDNLQQKLKDLQGAWMRCFDKKLAAKAPVFKKKSDNRDSIRFVNFDKYCRLEKGRVKLPAGLAWVKFRQSRPVEGKIKNATVSQSAGHWYISFQVEQELPEPIHPSGSMVGLDAGIAKLATLSDGTVFEPVNSFKTNQLKLARLQRQLSKKVKFSSNWKKQKGKIQRLHSHIANTRRDYLHKVTTTISKNHAMIVIEDLKISNMSKSAAGTTSQPGRNVRAKSGLNRSILDQGWFELRRQLEYKQAWRGGQVLAINPAYTSQQCACCGHTERGNRQTQNQFKCVACGIEVNADVNGARNILAAGHAVLACGGAV

SEQ ID NO: 4304 - protein, 408 aa, Spodoptera exigua
MQILKAYKFRLEPTEQQAQRLRQLCGCARYVWNHGLAETKSILDSGEKIPSAFELNRMLTCWKKDPEMAFLGEAYTDNLQQKLKDLQGAWMRCFDKKLAAKAPVFKKKSDNRDSIRFVNFDKYCRLEKGRVKLPAGLAWVKFRQSRPVEGKIKNATVSQSAGHWYISFQVEQELPEPIHPSGSMVGLDAGIAKLATLSDGTVFEPVNSFKTNQLKLARLQRQLSKKVKFSSNWKKQKGKIQRLHSHIANTRRDYLHKVTTTISKNHAMIVIEDLKISNMSKSAAGTTSQPGRNVRAKSGLNRSILDQGWFELRRQLEYKQAWRGGQVLAINPAYTSQQCACCGHTERGNRQTQNQFKCVACGIEVNADVNGARNILAAGHAVLACGGAVQSGRPMKQEPGTARAAITQ

SEQ ID NO: 4305 - protein, 248 aa, Spodoptera exigua
MAKSKAPLDVRWSRPLPSVPSSIIISKDSAGRYFVSCLCEFEPVSLPIAAKTAGIDVGLTDLFVTDTGFKTGNPRHTAKYAKRLALLQHRLSKKKKGSKNRAKARLKVARIHAKIADCRLDNLHKLSRKLINENQVVCVESLKVKNMIRNPKLSKAIADEGWGEFVRQLEYKGEWSGRSVVAIDQFFPSSKRCSGCGYTMPKMALNVRSWVCPECGANHDRDVNAAKNIKAVGLTALAHGATLNPEAA

SEQ ID NO: 4306 - protein, 938 aa, Begonia darthvaderiana
MVETYGELNADKSNAILICHALSGSHHAAGYHSSDDKKAGWWDTFIGPGKAIDTTRFFVVCLNNIGSCYGSTGPTSTNPETGKPYGPDFPLVTIKDWVKTQVMLSDYLGIYIWHAIVGGSMGGMQAMQWSIDYPSRLKKCVVIASTPKLSAQNIAFNEVARQSILSDPDFCEGRYIEQGKIPKRGLILARMVGHITYLTDEAMRVKFGRDLKAGKLMFNYDVEFQVESYLRYQGEQFSERFDANTYLLMTKALDYFDPARGAIEDDSINDSLSDTDALRLALANTQCCGNGDLLAHLQNKLGVFGYGIEIDQTKINDCITKGVNVIEQDLNDGLARFADASFDTVVMARALQAVKEPDQLLLDMVRVGKEVIVTFPNFAHWQNRIHLGIKGMMPMSEALPFAWYNTPNIHLCTFKDFEKLCDDNDIRLSGVASAELVANIPLNGSRYDSMEPMALLSQAKSGNQQAQFFLAKRYQKGLGIQQNFQQAIQWYTTAAKQDIAPAQLNLAMMYIRGEGVQPNAGQARYWLEKAAKLGDNRASYTLAMLDEKEKKLVDAYKWYDLAARDGMLSDQVRTRAQSKIGQLALNLSSQDIATARSRADSWFQSKHLQKTGKFFSAYDLNEYTKGSGELLGLHSQTIQAINETHAKSRKQFKKAKLSWRTNNPNSKRKSLGWLPFKQSAIKHIATHQTGKKGLKSTLQLSLAKGQKLIIDLWDSYNLSLYQINTLEVVQDSRNRWYACITVKDYPKQSCGTGSVGIDLGLKESATTSNGDKLQIKQTLKYAKALATAQRAKNKKRVKAIHAKIKHTRQDLIHKFTTRLVKDNALIVVGDVKTNQFNSKKGKLAKSVYDAGWFEMKRQLTYKCENAGCRFEIVNEKYTTQRCSCCGEITDNSPKGRKSLGIREWTCASCGTWHDRDINAAKNILAVGLDRLAEEIPER

SEQ ID NO: 4307 - protein, 1467 aa, Begonia darthvaderiana
MKTLKLRIRDKQVDQLNRLSGAVNFVWNYVNDLSYRHLQKTGKFFSAYDLNEYTKGSGELLGLHSQTIQAINETHAKSRKQFKKAKLSWRTNNPNSKRKSLGWLPFKQSAIKHIATHQTGKKGLKSTLQLSLAKGQKLFIDLWDSYNLSLYQINTLEVVQDSRNRWYACITVKDYPKQSCGTGSVGIDLGLKDSATTSNGDKLQIKQTLKYAKALATAQRAKNKQRVKAIHAKIKHTRQDLIHKFTTQLVKDNALIVVGDVKTTQFNSKKGKLAKSVYDAGWFEMKRQLTYKCENAGCRFEIVNERYTTQRCSCCGEITDNSPKGRTSLGIREWTCASCGTWHDRDINASKNILAEVAMKGLTLTDVFGASIDKPTLPSLFISHGAPTIAIEDTPFTQALHQLGADLPKPKLILIMSAHWESGEWLINANPAPSTLHDFGGFPKALFEIQYPAAGHTAAAQSIAKQLAQMQVAVKVVDNQPFDHGVWTPLLHMYPNADVPIVQVSLPHGFSPSQLYQLGQLFAPLRQQGVLIVASGSITHNLYGVRFNSQQIEPQAKTFKHWIIDQLKTNDKTMFDWQTHSLARHNHPTPEHLLPVFFARGAGDVMSVVHESFAHYNLGLIGVYESLLYKWIGDIVNWLGAYTPANLWAEKGDSLLMMAAVLVVSPILVGLSSLIHFQTLQGVFPMQMRWRFHRQMLGQSMQFYQDEFSGRVSAKVMQTALAVRDTIMTIADMLVYVLVYFVSSGIILFHLDGWLLIPFLLWMVMFFATVAYFIPKLKNSASRQADARALMTGRITDAYANITTVKLFSHSRRELTYAKDAMSQFLDTVHDQMRWVSRLELVNHLINVVLVGTTVALGLYLWYYNGLSVGAIAAATAMAMRLNGLTHWIMWQTAALFENIGTVQDGMKTLSKPHTVVDKPNARDLLITQGEINFSHVDFNYGRSGNKTNDTDAKQKLLDDFNLEIKAGEKIGLVGRSGAGKSTLVNLLLRFYDVDGGAILIDNQNISDVTQESLRQQIGMVTQDTSLLHRTVRENIAYGRPDATDEQIISAAKQAHAWEFIQHLSDAKGNVGLDTQVGERGVKLSGGQRQRIAIARVMLKNAPILLLDEATSALDSEVEYAITDSLNDMMAGKTVIAIAHRLSTIASMDRLVVMDRGQIVEQGSHAQLLAQNGVTIGMEEQRIKLNGKNAKYYNIKNPTASQTAHFYGGNGFALGVYEPLLSDLAQHLNITALTMRGEWYDKPTADKMTREEDADVLIEFLQKTQDKPIIGIGHSQGATATTIAAAKRPDLFSALYLLEPVTFTNQQGKLYSLVPRMVKMTREPFKSTQVKQANWGSVDAYYQFLRRHKAYKRITDEHLLTYAKNSLEPGEQAELTLRFSPKQELANYFGTPLIMKPLQQLIADNKVPVQLIIGKPSMFISQQVRQMWDKFVPSEQMTVLNDYGHLLPLEAPELCAKLIFQKLKLTS

SEQ ID NO: 4308 - protein, 2192 aa, Begonia darthvaderiana
MKTLKLRIRDKHIDQLNRLSGSVNFVWNYVNDLSYKHLQKTGKFFSAYDLNDYTKGSGELLGLHSQTIQAINETHAKARKQFKKAKLSWRTNHSNSKRKSLGWLPFKQSAIKHIATHQTGKKGLKSTLQLSLAKGQKLIIDLWDSYNLSLYQINTLEVVQDSRNRWYACVTVKDYPKTQCGTGSVGIDLGLKDSATTSSGDKLTIKQTLKYAKDLAIAQRAKNKQRIKAIHAKIKNTRQDLIHKFTTQLVKDNALIVVGDVKTNQFNNKKGKLAKSVYDAGWFEMKRQLTYKCENAGCRFEIVNERYTTQRCSCCGEITDNSPKGRKSLGIREWTCAKCGTWHDRDINAAKNILAVGLDRLVEGIPLLKQGEEVIVTALSHIRNFSIIAHIDHGKSTLADRIIQMCGGLQAREMQAQVLDSMDIERERGITIKAQSVTLYYNHPNGDKYQFNFIDTPGHVDFSYEVSRSLAACEGALLVVDAAQGVEAQSVANCYTAIEQGLEVLPVLNKIDLPQVDPERVIQEIEDIIGIEAMDAPRVSAKTGVGVDDLLQAIVERIPAPEGDRDAPLQALIIDSWFDNYLGVVSLVRVRQGTLKKDDKIHIKSTKGTHIVTSIGVFTPKSFETNILEAGEVGFVIAGIKDIGGAPVGDTITLAKTPDVDSIPGFKKVKPQVYAGMFPVDSSDFEAFREALQKLQVNDAALFFEPDTSDALGFGFRCGFLGMLHMEIIQERLEREYDLDLITTAPTVIYEIKKRSGEIIQIDNPSKMPDPGLIDEFREPIARCHILVPPDYLGNVMTLCIERRGIQVDMKFMGQQVQLTFDIPMGEVVMDFFDRLKSVSRGFASLDYGFERFETDKLVRVDVLINGEKVDALAMICHAEQARYRGNQLVEKMKELIPRQMFDVAIQAAIGSQIIARSTVKAMRKDVLAKCYGGDVSRKKKLLSKQKEAIVLVVRSFLIEPFNIPSSSMVPTLYTGDFIAVNKYAYGIRLPLVNTKVLDLGAPQHGDVVVFRYPENPKIYYIKRVIGVGGDTVSFNNGQLSVNGKAIATTPANFTPDPKMTAQLYPPGKTETGELVTAEQAAQLGNQEEQTAQYVQESPSSNHQHLVRYLGDKNWFQYASFLQQASPQLMASQGQQWQLTVPEGHYFVMGDNRDRSADGRFWGFVPDENLAGKAVRIRHEPTKSSARRQRNSQKAEDVVEVVDNTPGEMSVKLKYDEANNFFGNVDIVNRFEDTISAEDAKMNLPITIPTFNLKKLPPQVRQLTALFYQMGYQFDNVNLPIMALMHRSFDSEHNYERLEFLGDALLGVIIAEALFLRYPDYNEGRLSRLRASLVREETLVIIAKQLNLSDYLILGVGERKGGGRQRASILADSVEALIGAIYLDSQNFDTVKACVLAWFEDLFEKVKEQKVLKDAKSRLQELLQAHQLALPRYEVTETIGNAPNQIFVVSCQVEIIFDNKTAKPIAPTQALVTAQGESRRIAEQRCAEAMLNATQQTTTDPAVDNPSADNNQDVISQFFSGQSEAAPVRAVDFRTGYVAIVGRPNVGKSTLMNHVLGQKLSITSRKPQTTRHRIMGILTNEQLQAIFVDTPGIHSREVRAINERMNKAATSALADVDAVLFVIDSLKWVEDDELVFAKVQNLGVPVIAVVNKSDTIKDEAQLFALLQKLHDTQVFSDIVPVSALRAHNLDELVRVIGKHLPIAAPIYDAEQVTDRSERFLASEIIREKVMRASGDEIPYDLTVQIDTFKDEPAHQDPKTGKWRKAVTFIDATIFVERQGQKVIVIGDKGEKIKQIGIEARQDMEKMFDKKVMLTLWVKVKKGWSDDERQSLYAGMYLNEILQKLLPVEEPFAEIWQAYQQCLANMTTLFVDLAQSPYDMTRLKWYLRRFENVLFEQLGYGFDFAKDALGDLIILSQHYQYQLQQGFMPVLPLDKTDIALTGNVMTSNQPLLGVNIDHIATLRQARGVAYPDPVVGALICEQAGADGITLHLREDRRHIQDDDVYRLAKVITTRMNLEMAVTDEMVAIACDVKPAWVCFVPEKRQELTTEGGLDVIGNQHKIASAIQQLHQVGTQVSLFIDPELAQIDKSIALGADAIELHTGAYADYCLQHDQVKISHEITRIKTAVTHAHEAKASLLVNAGHGLTRDNVAPIADIDGIHELNIGHAIIADSVFMGLSEAVSAMRKAFTAKA

SEQ ID NO: 4309 - protein, 979 aa, Begonia darthvaderiana
MKTLKLRIRDKHTDKLNRLSGSVNFVWNYVNDLSYKHLQKTGKFLSAYDLNEYTKGSGELLGLHSQTIQAINETHAKARKQFKKAKLNWRTNNPNSKRKSLGWLPFKQSAIKHIATHQTSKKGLKSTLQLSLAKGQKLIIDLWDSYNLSLYQINTCELVQDSRNRWYACITVKDYPKTQCGTGSVGIDLGLKDSATTSSGDKLTIKQTLKYAKQLAIAQRSNNKKRIKAIHAKIKNTRQDLIHKFTTQLVKDNALIVVGDVKTTQFNSKKGKLAKSVYDAGWFELKRQLTYKCENAGCRFEIVNERYTTQRCSCCGEITANSPKGRKSLGIREWTCATCGTRHDRDINASVGGTPVFISRARGSKMYDTEGKPYIDYVGSWGPMILGHAHPHIIEAVKNAADDGLSFGAPTTFETTVADKICELIPSVELIRMTSSGTEATMSAIRLARGYTGRDKIVKFEGCYHGHSDSLLVKAGSGMLDIGEPSSKGVPADFAKHTITIRYNDPQAIKDCFAQFGNDISCVIVEPIAGNMNMIVPTQEFHDTLRAECTAHGAVLIFDEVMTGFRVGLQSAQAHFGITPDLTTFGKIIGAGLPVGAFGGKREIMECIAPLGGVYQAGTLSGNPLAMRAGIAMFDLLTAEGFYDALSEKVVYLTDNLEQLAKEAGIGFKTTRCGGMFGMFFTDSDTLPQNFEEVCQCDAQKFATFFHGMLDRGVYLAPSAFEAAFISSEHSQEDLDATLQAAKEVFSEMAKRNLEESQQPQSFFDDFAKSVTLYRDDDIWVIDKPHGLLSVDGKELKVSLQSRLLKADPNVKLIHRLDMDTSGIIIFARHSEAQSHISKQFIERIPSKEYQALVWGTPPQQGEIDVPVRYDPPQKPKHIVDMNWDKRAYTKYETLHHELREGKAVSRVALYPVTGRSHQLRVHMLHIGHVMLGDPIYAQDVLDGQAFDLSPRLCLHARKLRLKHPNTGVWMEWESPVPF

SEQ ID NO: 4310 - protein, 1449 aa, Begonia darthvaderiana
MIRELAKNIIYTGVAGTGKTYQLQQIAKCYTELLPVATQDDLLKNLVEPLSWREVICLVLLDEKQKGKSLLKVPELVQSAIFLAKASLKDRKENLNQTVWGTLQQFSNPNSLTVKYNSRASQAFFDKDESSNWFLLPESLPLLSDLQTKLTDYQTALNNQFQPKIERFSLVSFHQAYGYEEFVEGIRPHIADNGQMSYRIESGAFLRLCQQAKHDPSHRYAMLIDEINRANVARVFGELMSLIEPTKRAGQTDSLSVNLAYSHQPFSVPSNVDIYATMNSQDHSLAPLDIAFRRRFEFIECQPQPQLLGKVMANGIEIDLAKLLTALNERISQNLAKDSQLGHSFLWGIDSLQALSAAFSQSIIPQVAQACQQHGQILQAIFGQTFIRLIDNKKATGFMAQQADFDDEQDFDWLIEQNFDVFRIERKQQQWQLKVRHYIGVIGLPSGGQVEILPKLAQSQITHADEVTQTRQWVQQMLTAVWQALLPKSLANLANQLLINPAAPNPPPINHSLSLSEWLQAYFWQGFAQYVPNQQYQQFEQNQPYLQGKLLVKEQLQHNFHQPHKFYHQTENFAMDTAGNRLVKTTIERVIGSMAMPLPSPWQAVATVAKDLYDILFSQALQELTALPSLLAQRNYTFISFCYALLTLQQASSQGQFLTPTWLVNMPFAFEKWVGRKIQQQFAAQNFELVEQKRQPLTVQQGLTIKPDIWLKSADKLIIADTGKFFSAYDLNEYTKGSGELLGLHSQTIQAINETHAKSRKQFKKAKLNWRTNNPNSKRKSLGWLPFKQSAIKHIATHQTGKKGLKSTLQLSLAKGQKLVIDLWDSYNLSLYQINTCELVQDSRNRWYACITVKEYPKTTCGTGSVGIDLGLKDSATASNGDKLQIKQTLKYAKALAIAQRAKNKQRVKAIHAKIKNTRQDLIHKFTTQLVKDNALIVVGDVKTTQFNSKKGKLAKSVYDAGWFELKRQLTYKCENAGCRFEIVNEKYTTQTCSCCGDMSSSLSGRAGGIASINRAASYGKKCALIEAKQLGGTCVNVGCVPKKVMWYGANMAAAIHHYAPDYGFDLEVKQFDFAKLVQSRQAYISRIHQSYNNSLKNNQVDVIHGFAKFADKHTVEVYKNDGTVETITADHILLAMGGRPVRPAIEGAELGIDSDGFFDLTELPQRVAIVGSGYIGVEIAGVMNALGSKTHLIVRSKRVLKNFDADIVTTLTHIMHDDGIEFHYGLLPQQIRKNQDGSLSIELSNNETLTVDCLIWATGRAPATDTINLDKAGVEVNEQGFVKVDAYQNTNVEGIYAVGDIIEHGIQLTPVAVAAGRRLSERLFNNKPNEHLDYNLVPSVIFSHPPIGTVGLSEEEAVKGYGINAVKVYKSSFTPMYSAVTKHREPCHMKLICVGEEEKVVGLHGVGFGVDEMIQGFAVAIKMGATKRDFDDTVAIHPTGSEEFVTMR

SEQ ID NO: 4311 - protein, 381 aa, Micropterna sequax
MTAIGAPPQLPAKARPSILSTMLRLQTYKYELMPNGAQERDMRRFAGACRFVYNKALTLQKENHEAGGKFIGYVAMANLLPAWKKEFAWLKDSPSQTLQHALKNLERAYKNFFEKRTDFPRFKKRGVADSFRFPQGFEVDQANNRIKLPKLGWITRFATLSDGSFIAPLNSFKKHQIRLARYQCCMARKVKFSKNWRKAKSKVQKIHSHIAHCRKDFLHKASTSISQNHALVCVEDLQIRNMSKSSKGNGKNHGKRVRQKSGLNRSILDQGWPEFRQQLEYKTHWNGGVVVAVGPHYTSQACPACGHVAKENRQTQAKFACLDCGYENNADVVGAMNVLARGHRVLACGEGGSGLVRKRKTKPASVKQEPFAVTICEVTHA

SEQ ID NO: 4312 - protein, 589 aa, Zelostemma sp.
MVKNPPGPCQKCGSSTHSRSSSKKCPDHGPPRRKRKHLDAGITKADEKITTRKCALRNERIYDKIQEDVLEMSSLFVEASMYIHFCLYKKWAVGEFPEKAYDFLPYYYHLLDGSRAKYVMDTEYEGLRCSLYTARTYDKKYRSNLFVKHAQQYATLFHNNLWMHAYTRLRRFMREFTEDKTTIYQTLDALFTRTSQHKPDPLLIEEMKQRLDYDGITPLHDIQTKAGYHKHIALFYKLQRYNNENKLRNFKLVPILKHGRHHVQYDSLALHQLLSSLGLISGAHTDMENEEWHKWFDIRRVETKRKTFGYSLQTDGVALSLSMSEFTVNAQQPPKTKKVKRKDGKVLSKACDLSEIREKDSANKYDQFIGLDPGARLVMGGVAINESSDRRLIKISSKRYHHMAGFGSRKQKLLDWTSDVEKKSKTTLEPHDYEAYTKHRLTHFAERQAFYSKRKITRLKFKKYICTEQASKAVAHEIVGDGDSENRKRYHHRTVVFVGDTQIAANSPIRDYVRTPNRRILWHLEQIADVLRIEEFRTTKLCSDLQSLQSFCSFYRYKLWYRVGAGCQRWQQHSPYRTGSSCARPAVAE

SEQ ID NO: 4313 - protein, 215 aa, Saxidomus purpurata
MCGIDPGGRTFATVFDPTNVNAFQVGLKEDKHFVMSKLHKQIDESQAYLQNAEEKKHEQEKQNRTTQLKKLHLKLRTFVYDIDLKLSQFLVRNYKYVALGKIGVANIVRKDRPGHLSKKSNRDLLCWRHYAFRTRLEHRAKGTDCEVVVQEESYTSKTCGVCGVKKENLAANEVFFCHSCHYQTHRDKWSAKYSAEIAQTVSIQLNILTMRSIIT

SEQ ID NO: 4314 - protein, 227 aa, Saxidomus purpurata
MKRANGRFVMQLPCDPHWTRDNSNDNFEKSVCGIDPGGRTFANVYDPFKKTMYKVGIEEDKDFDLRPIHDKIDETHWYLNNAQKRKQINAFEDRKTQLKKLHLKLKTFVEHIHKTLCSHLVKHYELFSLGKLSVSRIVKKEVGKRGLPRRAKRDLLCWQQYQFRQRLYERSIGTSCEVIIQDEAYTSKTCGVCGVINKTVGASETFTCNSCSYETNRDVNGSRNILL

SEQ ID NO: 4315 - protein, 477 aa, Saxidomus purpurata
MKRQREKATLWDAAIVDTHETFWHWWQYIRRNDYPGDVKETMGFSELQKNVKRLKPDTETVKTTFSVGLRPTKSQKIVLNHMLKVSNQAYNYSNYLVREKRLKAKHFDLQKYVSKSNADAIPDEYRMTNDDWYFENKMSCIKGTSCKHFCTMYKSAQTNQKKRDVILKDKDIVYLREGSFQVPKKYLRSLNAKDTKDSSILNKCITFLGDNFSRARNNGKERFMRLAKPVNKLPPITHDVRISKRANGKFVLQIPCDPKYTRRSSSSQNTDAMCGIDPGGRTFATVFDPTNVNAFQVGLKEDKQFVISKLHKKIDKSHACLQNAIEKKHEQEKQNRITQLKKLHLELKTYVDDIHLKLSQFLVRNYKYVALGKIGVASIVRKDRLGHLSKKSNRDLLCWRHYAFRTRLEHRAKGTDCEVVVQEESYTSKTCGLCGIKKQNLGANEVFVCDSCHYQTHRDINGARNILLKSLKLFPFN

SEQ ID NO: 4316 - protein, 267 aa, Saxidomus purpurata
MKNNFKEPVQINRKIDKIPPFSHYFRIVKRANGRFVLQLPCDPFWTRSDNSNDNIEKSACGIDPGGRTFATLYDPVKKTTYQVSIEEDKEFDLRPIHDKIDETHWHLTNAQKRDQVKAIEDRKTQLKKLHLRLKTIVKHIHETLCLHLVKHYQLVSLGKLSVSRIVKKEVGKRGLPRRAKRDLLCWQHYQFRQRLQDRSIGTSCEVIIQNEAYTSKTCGVCGVINKTLGASEIFTCNSCTYETNRDVNGARNIVLKTLKIFPFANVV

SEQ ID NO: 4317 - protein, 479 aa, Saxidomus purpurata
MKRKRPDITLWDACNVQTHGAMWRWWKSIHLKEHKGGDSQTECIDDVDIIKTLSGFSSKIRRKEDSDKFLTTFSVGLKPTRFQKKILNLMLKVTNYTYNWCFYLVNEMNFPAKQVILQKTVCRTNSKDVDPVYRLPGDEWFFENKMSGIKLTACRIFCTSCHIAKKKGYKLKQKRDVSNCIREGSIGIQKAYVRSLTAKDRCRGPRSKHLVIMKNNFKEPVRINRKIDKIPPFSHDFKIAKRANGRFVLQLPCDPHWTRRDNSNDNVEKSVCGIDSGGRTFATIYDPVKKTTYQVGIEEDKEFDLRPIHNKIDETHWHLTNAQKRDQAKAIEDRKTQLKKLHLRRKTIVKHIHTTLCSHLVKHYELVSLGKLSVSRIVKKEVGKRGLPRRAKRDLLCWQHYQFRQRLPDRSIGTSCEVIIQNEAYTSKTCGVCGAINKTLGASETFTCSSCAYETNRDVNGARNILLKTLKMFPFANVA

SEQ ID NO: 4318 - protein, 479 aa, Saxidomus purpurata
MKRKRPDITLWDACNVQEHGTMWRWWKSTRLREDKGDNGQTECIDEVDMIKTLSGFSSKLRRKEDSDSFLTTFSVGLKPTRFQKNVLNLMLKVTNYTYNWCFYLVNEMNVPAKQVILQKTVCRTNSKDVDPVYRLPGDEWFFDNKMSAIKKTACRIFCSSCNTAKKKGYKLKQQRDVSNCIREGYIGIQKGYIRSLTAKDKCRGPRSKHLVIMKTNFIEPVRINRSVDKIPPISHDFKIMKRASGRFVLQLPCDPHWTRRDNSNDNFEKSVCGIDPGGRTFATVYDPVKKTTYQVGIKEDKEFDLSPIHDKIDETHWHLTNAQKRDQAKAIEDRKTQLKKLHLRRKTIVKHIHTTLCSHLVKHYELVSLGKLSVSSIVKKEVGKRGLPRRAKRDLLCWQHYQFRQRLQNRSIGTSCEVIIQNEAYTSKTCGVCGVINKTLGASETFTCNSCSYETNRDVNGARNILLKTLKMFPFANVA

SEQ ID NO: 4319 - protein, 479 aa, Saxidomus purpurata
MKRKRPDITLWDACNVQKHGTMWRWWKSIRLKEDKGGESQTECIDDVEMIKTLSGFSSKIRRKEDNDKFLTTFSVGLKPTRFQKNVLNLMLKVTNYTYNWCFYLVNEMNVPAKQVILQKIVCKTNSKDVDPIYRLPGDEWFFENKMSTIKLTAYRNFCTSCNIAKTKGYQLKQKRDVSNCIREGSIGIQKAFIRSLTVKDKCRGPRAKHLVIMKNNFKEPVRINRNVDKIPPFAHDFRIVKRENGRFVLQLHCDPHWTRRDHSNDHFEKSVCGIDPGGRTFATVYDPVKKTTYQVGIEEDKEFDLRPIHDKIDETHWHLTNAQKRDQAKAIEDRKTQLKKLHFRLKTFVKHIHTTLCSHLVKHYGLVSLGKLSVSRIVKKEVGKRGFPRRAKRDLQCWQRYQFRQRLQDRSIGTSCEVIIQKAAYTSKTCGVCGAINTTLGASETFTCNSCAYETNRDVNGARNILLKTLKMFPFANVA

SEQ ID NO: 4320 - protein, 373 aa, Saxidomus purpurata
MKRQTEKVTLWDAAIVDTHETFWHWWQYIRRNDYPGDVKETVGFSELQKNVKRLKPDIETVKTTFSVGLRPTKSQKIVLNHMLKVSNQAYNYSNYLVREKRLKAKHFDLQKARNNGKERFVRLAKPVNKLPPIAHDVRISKRANGKFVLQIPCDPKYTRRSSSQNTDAMCGIDPGGRTFATVFDPTNVNAFQVGLKEDKQFVISKLHKKIDESHAYLKNAEEKKHEQEKQNRITQLKKLHLELKTYVDDIHLKLSQFLIKNNKYVALGKIGVANIVIKDRPGHLRKKSNRDLLCWRHYAFRTRLEHRAKGTDCEVVIQEESYTSKTCGLCGIKKQNLGANEMFVCDSCHYQTHRDINGARNILLKSLKLFPFN

SEQ ID NO: 4321 - protein, 477 aa, Saxidomus purpurata
MKRQREKATLWDAAIVDTHETFWHWWQYIRRNDYPGDVKETMGFSELQKNVKRLKPDTETVKTTFSVGLRPTKSQKIVLNHMLKVSNQAYSYSNYLVREKRLKAKHFDLQKYVSKSNTDAILDEYRMTNDDWYFENKMSSIKGTSCKHFCTMYKSTQTNQKKRDVILKDKDIVYLREGSFQVPKKYLNSLNVKDTKDSSILNKCITFLGDNFSRARNNGKERFMRLAKPVNKLPPIAHDVKISKRANGKFVLQIPCDPKYTRRSSSSQNTDAMCGIDPGGRTFATVFDPTNVNAFQVGLKEDKQFVISKLHKKIDESHAYLKNAEEKKHEQEKQNRITQLKKLHLELKTYVDDIHLKLSQFLVRNYKYVALGKIGVASIVRKDRPGHLSKKSNRDLLCWRHYAFRTRLEHRAKGTDCEVVVQEESYTSKTCGLCGIKKQNLGANEVFVCDSCHYQTHRDINGARNILLKSLKLFPFN

SEQ ID NO: 4322 - protein, 479 aa, Saxidomus purpurata
MKRKRPDITLWDACNVQKHGTMWRWWKSIRLKEDKGGDGQTECIDDVEMMKTLSGFSSKIRRKEDSDKFLTTFSVGLKPTRFQKTILNLMLKVTNYTYNWCFYLVNEMSFPAKQVILQKIVCKTNSKDVDPIYRLPGDEWFFDNKMSAIKLTACRNFCTSCQIAKKKGYKLQQQRDVSNCIREGSIGIQKAYIRSLTVKDKCRGPRAKHLVIMKNNFKEPVRINRKIDKIPPFSHDFKIVKRANGRFVLQLPCDPHWTRRDNSNDNFEKSVCGIDPGGRTFATLYDPVIKTTYQVGIEEDKEFDLRPIHDKIDETHWHLTNAQKRNQAKAIGDRKTQLKKLHLRRKTIVKHIHTTLCSHLVKHYELVSLGKLSVSSIVKKEVGKRGLPRRAKRDLLCWQHYQFRQRLQDRSIGTSCEVIIQNEAYTSKTCGVCGVINKTLGASETFTCNSCSYETNRDVNGARNILLKTLKMFPFANVA

SEQ ID NO: 4323 - protein, 479 aa, Saxidomus purpurata
MKRKRQDITLWDACNVQEHGTMWRWWKSIRMKEDKGGDCQTECIDDVEMIKTLSGFSSKIRRKEDNDKFLTTFSVGLKPTRFQRNVLNLMLKVTNYTYNWCFYLVNEMNFPAKQVILQKIVCKTNSKDVDPIYRLPGDEWFFDNKMSAIKLTACRNFCTSSNIAKKKGYKLQQKRDVSNCIREGSIGIQKAFIRSLTVKDKCCGPRSKHLVIMKNNFIEPVRINRKIDKIPPFSHDFRIMKRANGRFVLQLPCDPHWTRRDNSNDNFEKSVCGIDPGGRTFATVYDPVIKTTYQVGIEEDKEFDLRPIHDKIDETHWHLTNAQKRNQAKAIEDRKTQLKKQHLELKTIVKHIHTTLCSHLVKHYELVSLGKLSVSRIVKKEVGKRGLPRRAKRDLLCWQHYQFRQRLQNRSIGTSCEVIIQNEAYTSKTCGICGVINKQLGASETFTCNSCKYETNRDVNGARNILLKTLKMFPFANVA

SEQ ID NO: 4324 - protein, 325 aa, Saxidomus purpurata
MYKSAQTNQKKRDVILKDKDIVYLREGSFQVPKKYLRLLNAKDTKDSSILNKCITFLGDNFSRARNNGKERFMRLAKPVNKLPPIAHDVRISKRANGKFVLQIPCDSKYTRRSSGKNTDAMCGIDPGGRTFATVFDPTNVNAFQVGLKEDKQFVISKLHKKIDESHACLKNAEDKKHEQEKQNRITRLKKLHLELKTYVDDIHLKLSQFLVRNYKYVALGKIGVASIVRKDRPGHLSKKSNRDLLCWRHYAFRTRLEHRAKGTDCEVVVQEESYTSKTCGLCGIKKQNLGANEVFVCDSCHYQTHRDINGARNILLKSLKMFPFN

SEQ ID NO: 4325 - protein, 477 aa, Saxidomus purpurata
MKRQREKATLWDAAIVDTHETFWHWWQYIRRNDYPGDVKETVGFRELQKNVKRLKPDTETVKTTFSVGLRPTKSQKIVLNHMLKVSNQAYNYSNYLVREKRLKAKHFDLQKYVSKSNADTIPDEYRMTNDDWYFENKMSSIKATSCKHFCTMYKSAQTNQKKRDVILKDKDIVYLREGSFQVPKIYLRSLNAKDTKDSSILNKCITFLGDNFSRARNNGKERFLRLAKPVNKLPPIAHDVRISKRANGKFVLQIPCDPKYTRRSSSSQNTDAMCGIDPGGRTFATVFDPTNVNAFQVGLKEDKQFVISKLHKKIDESHACLKNAEDKKHEQEKQNRITQLKKLHLELKTYVDDIHLKLSQFLVRNYKYVALGKIGVASIVRKDRPGHLSKKSNRDLLCWRHYAFRTRLEHRAKGTDCEVVVQEESYTSKTCGLCGTKKQNLGANEVFVCDSCHYQTHRDINGARNILLKSLKMFPFH

SEQ ID NO: 4326 - protein, 662 aa, Chloropicon primus
MSLSSPTCRAAGSRAASLDTNACTVAMATSAGPHREREMAAIEENVDPTTLLNADGLIASLRFADESAGPRPTLAREGTRAERTRQPEELTLVRVVRGRGGVYLELVEGLKGLTHCIVFLRESIVQEGLGNKLAGQAATISSALLGKDLPKQVKAFRFVELGTASRSRCLKDRKVLTKALALAKEKGEPCALLVAALSRLSRRPQAYKDLDYLAERAGQASILACIPTSHAAALIGEEKKEELKKYMSKAASTSDGQAVYSASHCMLKSGATRCSVASGQHTSEELCLLVEHVEHVLRHKLENLEKPGEQKHGKPLLLVGIARTSPGTDVAKSTSIYVQRCLLLHVLSRGSTSEEAAVQEWVKKVCDEGKYAELCTRADRLTRELATLGTLLERCCKANIATVACLTEVDAVVTEERHVQEAVAQVLAGDEEYLLGKRFVEQRASDLVRAWKNQPTVRVLVAACSITEANYDIILREEHMEFLETYRQYCHVHSGYKENAEGGGVNVGSGRQKSENRKAKEVDCKAIDGLLEEEDANLSSLSCKISNEKSDLESFSSKAVSLVQDEFVVKAGGVLNEIRMLLTLRHYAFRTYLASKVLLHGSELAIVTEEYTSKTCGRCGHIKENLGGAEVYKCQECGFKCGRDANGSRNILLKHLWEPKNL

SEQ ID NO: 4327 - protein, 855 aa, Pseudozyma pruni
MSSITLTNIARDDLPRRTTAHGPDVYPFYDPNLANVYDRLVKPRLSLSLGSGPMSVCDPSEAALRHCWVDTRVTKFLPNQGQEKRWPFDTTIVIERDPNAFPTDLGGLPIKDLGDEAVSRLGGTVPSSDDRLVASTSSATGPIPSASWPVGSTLDTAPSSLHAPFSMHPTSSAPFPLGPVWLPASMPISTVSGTDPFASWSPPLPPQPHMHFGSAAPPQPLWPSISSSSVPFASVTQAPISFWPPPLGHRSNSYFGLAALPRLALPSDSLALAPGTSAPIASVPDTLPSASHADSDSLVPVPAISADDPWWSTSGPLDAMDVDEPVPSPPHTPMDVDEPTSTLREPQSSQPPPPPPPPPPPRAATGQQAAASVGKPDITNTRTLVYRLKPPTALKLLLRGYREALRVLQNEAIWWVNQAYTQNHPHLNEFGMYRLLGNNGSTFVKRHPFLKDCPSYARRSVIKEVIANRKAILTNHANLPANQRSRRMVPDMKPINIHKEQLKGWSVAFTGSASIEVRSDPLDSTKIAGLELRTPRSKIGRLNVSEYRSKVCLRGQRQRRFLLTDVCPLKGKRHTLPSHWSIKCRSDGRWYLHLCYELVDKQRFEADQAAAKQRAGRTVHTGDTRITVVDPGIRTPFTAGQMDGRVIEIGDEDDRRRLRRLRHRSDELQSKFNRLRRPNRRARRGNGKGKRGTRHAESQQERRRLQYERKTVLSKLANLIKEVHCRVAHWMIMSSDIIIMPRMEVLGMIRRRRSKLSRELKRELLCWGHAAFVNRLAVMCHDIQYKQRFPHRLGHPTTLLIQPEGYTSKTCAGCGHINDRLGALKWFRCPSPSCTYEADRDHNGAFNMAIKAIRG

SEQ ID NO: 4328 - protein, 599 aa, Pseudozyma pruni
MTSITLTNIPRSELLPDNNSRGAYNGFGHPALTGTWFDVRFNHYEIGPVQRWPFETTRILDHCDDEAPTDRGLLDPGDLGDEVESLIPSAPSNNRTANAASTTSPAVSTVNKPPLGDIRSRKFLLDVPADLRAVFRDWNAAYIKTFNEAARMANLATDFDNDNLSEYELYRLLVNKSSPLVVLNRELDLCPSVIRRGAVDDAVRARKALLSRFGARAPSVSLKPIDPSRPFCFNNASDAGFIRPQWRDPLDPSQGQYGPKLQFYPKILKQRGVSSVVDIRLRGQKARRWLVDRCERKEVRERVSGTKQWVPVERFCFPREWQLQLDRYGDFYAILQYRIPESKYVKEHTLHGPLLVRTLDPNVRTAFAVWSSDGTTIDIGNEHDRDRLKVLRLAMDRLQSEENRRQHTDSNTDCNSNSDSNTDSNTDSNTDNVLPFYWPSKIRRRFRLRRRRLAKQHRQLVDNLHQRLANYLATTSDVIVMPRMEVRSMIRRRGRSLHRSTKRQLMAWAHCAFLNRLIIKCHDVAHDHRYPHKAGRPTVILVQPEPYTSKTCPACGNLNQRLGSNKNFRCPSCAYHADRDHNGAFNMILRAIRSPDYVV

SEQ ID NO: 4329 - protein, 609 aa, Pseudozyma pruni
MTPSVMLSNLARTDLQRRGTYRGIDVYPFYDPKLERLYKQLRLPSKDNFVGHIKGDADPTAQTALAKSWIHTKVFNYAPHRRAYSWPFARTTVYDRDPETTPTDMGALDVEDLGRLVVQTFENADTAPTTPSTNIASITTSATVPKPKPNEKRARKFRLVVPADLRKLLHEWRASAIFTKNEAIRRVNQATDYDHPDLHKYRLAAELSKNDGDFVKNNADRNLHKCPHSIRQQVVSEAVSCRKAIITQHRRGLIKGPLPDTALCSEEKDQYRGFMLFFQGKAGRIVSETRTYQQLEVVDDSVKLSAVPHEELLPLKLRLLPNVMGRAAVDSVVEIRLQGQQQRQWLVDICNVKVQKSTGVSHRLPHLWGIQRDRYGDYYLVVNYRKADPPQAASLQAFEGPINIKAIDPGVRTAFTIYSSDGHIIEIGSKDDCKRLERLRLAAYELHEKIAAPDSGLSAAQRRRLRKRKARLLKKHRNLITDLRFQVVHYLATTSDVVVMPRMEVLSMIKRKGSVLNRKTKQALVSYARCTLLNELCLKAFDIVGDPRYNKTRPTIVLVQPEAYTSKTCAQCGLINEKLGSKKTFQCGGCGYSADVITMASSAPNHGVG

SEQ ID NO: 4330 - protein, 658 aa, Pseudozyma pruni
MNAVTLTNIPRQDMAVESRSRHVYPFWDAQLAAKYGQLNLPHKDRKQEADKPNHPALRNTWFDVKVFHYGKGLGTLQRWPFSLTKIEKADGIPTDKGLLDPEDLGDVLSVTPSLDSPLPPRPSGTGASAHDAALVKKKITDTRCRQFPLKNVPEDLRKLLWKWYTDGMVPAKNEAIRIVNSVTNEKLLPHARRLYKGICPRKCAFAVSQGQAYMECPSQVKRSAVLGAVSSRQAILTRFEKSKKKPKIGAIVPDPRKGFVLTFAADMGAILFEEQNKAKLARSNSTADTSGIRSCSDDGCKEGFAVPRLRFAPRTLRLAGVQSPLLDIDVRGQPNRQWLFDICDSKERPKKSRAETQDEAQEDEDKDEDNTDNMHDDVGCGAIERMLPREFAIQLDKYGDYHLLVFYKVKTTKEKTTETLKGEPLIGAEDPGFRVGKTLGSANGTVTEFGCEKASARLAALRARANGLHHQRTEKLVDEKAEEEKEKEKEKDEKNDEAAPFALSSKKRRQLRRKEMRTRKKHDNLVRDFHRRTANYMATTHDVLIKPRFEVHGMIKRGRSKLPSSVKEGLLGWAHCKGLDIQALKCHDVAHDARYDKTKPTVLLVQPEAYTSMTCAKCGHLNRKLGPSKIFKCPSPTCDYEADRDHNAAFNMIIKAMR

SEQ ID NO: 4331 - protein, 218 aa, Pseudozyma pruni
MDMRNEMVIVEKRERGNHVHKQHHPIPPPAPAPQPPPVDRAAPRPGRPPRSLPFALSAKKRRRLNRRARAARCQVHNLVKELHCRAAHYLALSLHVIVMPRMEVTQMIRRRGGRSRLPRSVKRRLTTYAPCRFLNRLLLKAKDISVDPRYPGKRPTVVIVQPEAYTSKTCGSCGTLNERLGSNRTFTCPACHYTADCNHNGAFNMLIKAIRPPASPRS

SEQ ID NO: 4332 - protein, 1112 aa, Sporisorium sorghi
MEGDKIIDMKLQLAPRCVTKAGGTTLDTLVKIHLCGQAQRRFLRDKCLPKPLARSTKYEIHHEWGIQLDCYGQWHLLFPFDIPASTLQAREHLFEGPITIKSADPSVSTPLSVWDSSTGTAMDVRCVEDGARLEELRRQDAKLQSRRSQRQSLPPSPFPAQPRLQHTHRQGHPPQPAQPPHPPQPVCPPHRPPHPPHEHPPLVPYALSSSERHKLLKRSKRLQKHIHNLVTDLHCRAANFLASSSDVIIMLRMEVRQMIRRHRRGCSLARSTRQRLLGWGRIAFINHLAVKCFDVSVDARYHHKSRPTVLLIQPKAYTSKTCGTCGELNHSLGSSRHFDCLHCCYVSDRDHNGAYNMLGSQMPHTIVSTPPPDTTGWQLAAWVALTTSHVQRDVSKESSRLGQQPGAVKENEAAAVLDAARIDTLLVFWPDKLVDLSSLVSALGNKTCPTLLVGRIVPGHSREAAVVVIGTLQALDIEAVSDAIASHRLSIVGSLATRNDADVTVDASAFAVRSSSSIWLSISEPRSHNELPKVASVRVDQPQTANGQVNTEAGYAHNAPCAIGLVSYSVPNSRMLQYFALESLRLAPVSGMKLVSTASALLVPDAQLSAGPRLTTNDFAPSTLENKFLQLLHLDPVLWRSFRSVRPGEGQLPRGTALRKSIEVINQLQALHEHLATFRETSSSTNAGNGVAGSSLHDTMAPKPSGLLSRIDRATTWIALAVQGALRHPLYTPKEPAVVIDGVAKRSSEAKAKSLRLTNVSASARQLDVRISQLVVAPRLASRLRYLRKQQKLPIDEIAAPYIGLWNAIWLIANDVILGHAASVLLLQNKALLAELARTLSERYLLDAVLWLLSWLENWPAGLKLNTELSLFFSDAYSSLTVAWHVQGLAHILPRLESVIVAVAFAGRWMGVTMVLCMVQDLVSMCTLHLTIFYTLSFRTLRGFVYVLSSLFDVFRGKKRNALRGGRLDDASYELDQLLLGTLLFTLVAFLFPTVYVYYLAFGLARFGLVAFEAGAVETCLGLLNHLPLFALMLRIKDPHRLPAGVWLQDVPGTADGAPALEVGRFRLRSRPLTVGDIFEGYGQHVGGLVEVPSMLLRCVFGRSLRPPSSSE

SEQ ID NO: 4333 - protein, 654 aa, Sporisorium sorghi
MIPVKLTNYPREDLLRRGKDRGPHVYPFRDPLLENKYSKLMLPATEHAVEGQMTHPALQNTWFDVKTTHFTANARGTIQRWPFGKTTVEQTLGHMPSDRGRLNLEDLGGVQEALEKAGENASSAQSSLPSSATSSAQDSLPPSTPSSAPSLAPALAPALAPALAPALAPALTPLPFPAVLAPEITNTRVREYKFVVSKDLRKVLREWAESYVITKNEAIRRVNSMDTVPSEYDLYKELVNNTSSFVAEQKAAKGIMLNKCPTQVRRTAVLEAVAARKSLLTRHKKGKKVPEIKPVKLSRDFVLTFPKTSGFVSFERNKPSDKWNNPRLCMTPQLLGSRGVSPYVDMRVSGQKNRQWLYDLLQTEDEGNLTERFPMRQEWRIKHDEKGDFYLIMAYRVKTTKPKAKTTLGDSSSSLVISVDPGVHTALTAYHSDGKVVEICNTDDAKRLADLRLAADKLQARRLLTKDQVEKKSDVDAEPQEQVEEKDNVDKAQGSTGAALALPAKQRRRLHSQELRIDKRHHNLVKDMHRRAANYFATSADVIVLPRMETSGMVKGKRLRKSTKRSLLGYAHCKLVDRLYVKAHDVQHDKRYNNKKLLLLVQPEAYTSKTCANCGHINDKLGSKKVFECPHPQCSYIADRDHNGAVNMLIKAMR

SEQ ID NO: 4334 - protein, 521 aa, Sporisorium sorghi
LRNLLWKWYVNGMVPAKNEAIRIVNDITSQKHPKLNAVKLYPEISNETCAFSLQNEGYADTPSAVRRAAVLEAVTSRKAILTTHAKSSNKSQSKSRRKDKSQDQPQDRPQDRPPPKIAPIVPDRKKGFVLTFTKKYGFIQFQQQTQKAARSKSQSTHAQGARCETKGFKTPRLHFAQRLLKEAKIQSSLIDIDARGQQSREWLLNICEGGQWQSNNSKGSVANAEEQADDQHDEQDDWVFERQIPREFSIQLDRYGRYYLIVKFKVDTKEEAKVQVRGSDILVRGGDPGVRTAQTWYSSDGTVIEFGSKKDSERLASLRRKVDRWKSQRMKKQAVDGKEAGEDVEMGDGSVSVDVQGGSEVGKDGDAKDGDAKDAPFALSSKRRRQLRRKEVRALKKHSNLVKDMHRRTATYLAQTSDVLVTPRMEVSGMLRRGSVLKPSVKRSLLAWSHCKFINVLALRSEAEGKVLLVQPEAYTSKTCANCGNQNEKLGSSKTFKCPTCSYTADRDHNAAVNMIIKAMR

SEQ ID NO: 4335 - protein, 461 aa, Sporisorium sorghi
MIPVILTNIARDDLPTSKSRSPDVYPFFDSQLSHKIKNEAIRLVNQADSHTHPNLDVYRMAVLDVITARKSLITRHINTQRRRPIPDISLCSEKQDRERGFAVYFNNFSGKVIVSRESPDGPILGLTLDLMPHLVNKLCKDTTKSSSKAEIRHRGKQGRERLIAICREKTRFLYQLPREFSIQVDSAGHWYLLAAYHLTDPHLFAAKAKERKERKRIDFQGPINVKAADPGARTFLAVYSSDGQAIDISGDSDRQRLHLLRTQADQVQEKESKKKKRTRRAGTRRRRRRRRRPSKPPKRRRQRQRLKHELGSAERRPLRKQHRRLHAEMRNLVTEVHARTAHYLALSSDVIIMPRMEVAKMVRSRTLSKRTKRELLGWSHLAFLERLAIKCHDIEFDTRYVHKAETTLLVQPEGYTSKTCSNCGNLHQSLGSNKRFLCPSCPYQADRDHNGAFNMVIKAIR

SEQ ID NO: 4336 - protein, 1451 aa, Coffea canephora
MKSVLIRGAAASSACSKPLSGCSPALKPPPWAESSPGFKGLKVCVIEYSSTIFGYEDQVGVHFKNAVSSCSDSLDLVHRPSILKAMKQTKTLKVRVRDKHIAQLNRMARSVNFCWNYLNELSSRAIRERGLFLSAYDLHPYTKGAGKELGLHSQTLQCIAAEYVTRRKQFRKARLNWRKSRGVRRSLGWIPVNTGAAKWKSGQVFHNGSYFKVWDSYGLSQYKLRSASFNEDARGRWYFNVVVEIEVDPPAGQDKIGIDLGLKDTATCSDEKRTKNIHAKIANRRKDALHKFSRQLVNRAGEIYVGNVKSSSLAKTKMAKSVLDAGWAMLKTMLEYKCDSAGIVFKEVNESYTTQACSSCGCISVSSPKGRSGLRIREWTCSECGVTHDRDVNAAKNILAVGHGRPEVGIPVLRAGRMSNSTPAVPEHEAQRLLTLKRYTLGDLSADQEFDRITRLAAAYCETPIALITLVDASHVWVKSGVGEYSPTALRQLSLCGEAILEPKLFEVSDARLDARLHKFPMVSEAPHVVFYAGMPLVADNGNILGTLCVMDHKPRQLSPTQRELLQQLASSTMLQFEHYLSQRAYQAIGNAAIGLWEMDVATRTTHWNDVVDALYQTNARQANTFEARMQAYTPEDRARLTQAIDTAVTQGTPFNDIFEMQPPSGEPLWVRITGNPLAVNGQVVQIIGTMLDVTPRKKVETQLLRQQALEQAIMRAQASFIDEQGNAKALNPLLDDLLTLTGSEYGFIGEVLYHPDKTPYLVTHAITDISWDEPSRQFYAQHAPSGMVFSNLDTLFGHVMRHEEVVIANEPAHDPRRGGLPPGHPTLDAFLGAPIHFHGRCIAMIGLANRPGGYHPDLVEYLAPLLGSIGQFINTLRHYRQQQQDQQAIARLSLVARNTSNGVVITDARGNIEWINDGFTRLSGYTFAEAVGKKPGQLVQGKATDRATVLRIAHALRHRQHFEEELLNYRKDGTPYWVHISCNPLPANEQTGGGFIAIQSDITDTKLHEEALYKAANIDELTRLPNQRLARTQLEALVRQDTPLAVAILNIDDFKRLNDLFGYATGNSILRRVAKRLEALVSPFKAQGITARLSGDEFVLAGPTQRLTPSTIQHAIQQPLHVNGQKLKLTACLGMTTYPNDNVDPDALFRHAYQALYQAKTQGIAQCVRYSTDEEHLVKLRQQERSAIQHGLANNEFRLYYQPQVDLKSHTVVGAEALIRWIHPQQGLRNPAEFLPLLEGSELEFHLGEWVIEAALKQLQSWLAMGIELQVSVNISPQHLLHPGFLPQLEQLLLYYPQVPSRLLAIEILESATLDDMQAALHVLEECQRLGIEIALDDFGTGYSSLAYFRRLPVQLIKVDRDFVRDMLESEDDKAIVESIIFMARKFSRPVLAEGVETMAHAQALLAMGCHLAQGYGIARPMPADALPGWLETWQAEDLHYLNRTTPSGR

SEQ ID NO: 4337 - protein, 670 aa, Absidia glauca
MKNAIVETFEARCIRYLEHCLRQEKDLVLENNHIKKLALNLYDRLSGATTPYWPTSVVKSNDLETILNRIVQNEDLSPSPITAKSLTSNICDYTGVLYRILKKYEALNVSSASISSEPTVDDLAENVSPWWAYGQLKDLDDFTSLGKRQRQKVSRQLRSQINNPVGPTPTFTIPLPEELRAVLSTLVVDTRKLIANSTRLKSGDQVPLNDCFAPRKSSQNAPHRLFQLLPMRSFRMPFITLDIHTLVSLYNNSITRTNDTEWAGVSNKQGIHRIREDSQTFSRVFNLSKVRLGRSDEAFDDIEDHPPETRRRPLFNNMVLTDGFTVNILLTRATSSTKLLDLELEDIAKPHVAQYFDLWGADPGLKDIFVATDGQQQYRKFSAAEYRCKTGQTRRKAERDRLHRQANITTIESAIPTTKISSSSSLIAAIRYILEHLSPLLALYGDVMWAQHRLWDYSGAQKLDHELVQVFLNGGRKYDPSTAPHPTMQHRTSAHPTRFRQAPSTRKTRIPLIGMGDGSFGMTMRGIKPGLATHFKKVLKHAELQGKLLVVSVDEAYTSKVCSRCQVKEMENMEIGTDSRLHSVLTCKGCNTVWNRDVNAANNIFSLAARAIDGLPRPAIFCRPPTTSVAATTTTXXXXTLQPTVRITIPYDQKCHFLEHGCAFECSDGM

SEQ ID NO: 4338 - protein, 536 aa, Tetradesmus obliquus
MRRGSLLALLHYTRLLGDGQDRAADAITLWTDSGWRQVMTIGLPTFSIRKLEDPEMCVTYEMYKHMFPADDPDLSHMPTGAANTLTHAATQLRTAFTNNLWVPLVPRLKRLCRAWRRKRKQEQVARSDDPSIIDLVRAIETGADYAMEKKMHAAAVEFVTEVRRRLGLPDAGAKLTESYAKRNQQQMLLFLAWLQRRVEALGGKGVRLCPVFSVRRQHVQLDCTTLLHMLSGMRLVPEHLMVKQGEATDWEGVLDLVAGVFEPPCPAKQKGKLQWWGSLSTDGVAASFVYADTRPVSKKGTKTAAAAAAVTSSSRSKGITTATTPALPPPHDLAVVGIDPGRCTIVHAATQVQGTCTLERTLPRKRYRLESGLAQAQAKERRWDTAMIGGAWKQMNQQGGALRSSSLQQLTQHIAAYNSVAEEWWTSAMQRKRAKLRFRTYGGCKRCLDRFFSGLERDVSAAEPNKRLAIAYGAATFSPSGTGKLATPTTAAYRAALRLRSSGAIVEKQNECRTSSSVVTVMEIPFAIQSGYGAGD

SEQ ID NO: 4339 - protein, 896 aa, Rhizomucor pusillus
MFAQNFLSRECSRKNAPAVYKEVHKQLFSSLSDEQKPNPSYSGTFVKRHKTYNPLKVYQRLLDDLEKGKTTVSEPIEPNDQEEEEQQALDGNDGDLAGDNKAIRTVTASLQNIVHPDFEPSVLQEAFRKEQEIVSKHMKFLSRFIEAFITKVTTGEISKISGYPDSTTKAVDIDFRDFATNFEFDKEAETKLLVAPVQEDLQKFHQSKVYTVEHLSNIMSGCVGRSINEKEESETFKQIRQLLLQAVNGDKQDASFRHSPTIADALLHSCGLPWHYEDWKNFTQAPRKSGGKEGRRTAIHKSGGKEKVKSLMKQLDSALLSGQQNWGIQSLERLKSAISQPREQTRSNVRTEDAYESNVFDLSEEEDEDNIEKQEITPIAQRGPNTDRQPEDVKRVLYRGTEATEDQLKEVARIINFLRPFVHRRDDKNELPQINPQQSPWMMFPNVEKDHSLHLGAAGLYNIMSKTHILRYDGTPITDIETATWHPKDIFWNFFDVDKIQISLQEQKLQTMWRLCYIDKYRIRVLGYKIVRANRKRKWKREKDAAQTKSILTDEERDRIEQEWKTEKERADAGXKSRTAEKQHGWNRTLYSQLKEARGKADSLYLEIQEEEQTIALKQKKLYHLNRKLTRCPSTCSNNLSGEGLVQELLYEHLQGQRNVGITGIDPGRVTTATISTKRIRSLFEDINRFEALQEDTDQIADIDTDVERCPKPVELKTGLIENATFRTVHRALRDQGQETNVNWKPVNSRVKGHACSGSLTKLEQTLKAPEPDKLYTIDKYNTTKTCGYCFKKIQIHKYRRDGIFVRVKGAVSCPNPRCPSRIVRHTTCSRDAVAASNIALSSISRALSDDNQPLPCFRRGQSKDMRFSLTQKFQLDCGRTRLVTDRSFSRGKDLD

SEQ ID NO: 4340 - protein, 228 aa, Rhizomucor pusillus
MAKFPARTSRLPIQNEFAVRSTLQEDKNKLDMKQKKWAKAKFTPNSEGKLPLVVFGNGMFGKENIPMKGHRSGLIGVLYRMLKRREARGELVVVIIDEYLTSQVIGDCKIPLKHLLTPCQYIRFAIIAKWGSLKNVATADGVRYNSLQVCKNCDILWNRDTNACKNMFHIATSIWSANNRPGPFVRSKQQITTTNAEYLLANPASIQIRFQRDAKLMLQTQTVSVVAG

SEQ ID NO: 4341 - protein, 515 aa, Rhizomucor pusillus
MIITGSYPSRETGNAGEDDVTSFNVARLHGATNKGASKACKKSFFTPTPLDGMEKDDLMTCIETWEERISALQERSKELNMRKHTSIKTLSKAEQEGAKRADLKSLQLAKADAEYEALKNQLALKDFRAAVNHTKWMMKNQDRKDGSGKEQERMARPALEHHTYEARSVGSIKTTKGGSKIVQEACIQWDRLRYRKTSVTVPISLQQYRHHIELYKRFQPLSTKEEDMRMPSTISSKHMYNKAMVYKNAKYREKRKARNPEVREAEENVANNNIHSAKSVEDVSNWQKEASREKAYVKEACGTGKKSIPIMFIGDQGLGTNTRLNGHVKGVATKIRKEHHLHTVVAMTSEYRTSQTCDWCLGPVVGPKATILKDGKKKKRSVHGASLCMNTKCPLYRAGRAVQGRDYMAAICIALNGISRVIDDIHLSPFTRHSAALHMLNTSNSPDIIGDNWTSQLCIFQRGKKIEGYFYINSCTMRPGASFCAGSAYGLARISQALSRQISVDYSGSTLIRFL

SEQ ID NO: 4342 - protein, 443 aa, Rhizomucor pusillus
MLLNLESDFPLQNWLETDFFAEVWLSLTLRTVKSSRTDGTRRYRGLIDRHIKNYLKHSGFNRKALTNSQQIAHYEGSRIFTAYLNSIKNCFGNRLRYVINLLLKVKDNRARITKEMTEQGKSSQKIKEAIYKQVTTPAHDVKQALLPSTPGNHALAYVMMAKFCEDHEIKTFKCMPLRTSWIPAHMQIDTKILATQTLKKPNNIDFDSGLWKQVVNFQSKPLQNQGADKSMAFKGTIFTDGFGVSILKQNFDSGFGLKPKKMKADTKSDFTYIHDLDKTTLGNIKPRTLFIDPGRRDLLYCMHQDSTSEALLTYRYTRNTKAIDTKATQYKKLRQRIKTNEVKGCEAKLSKHPAATVYIPKFLLYMKTRCERKPWDQIVEDPVLIIGNWSARSLTMNKYHEPARGIGLLRMLRNKRFQGYLIDEFKHRVSVLIARNPWRHSKW

SEQ ID NO: 4343 - protein, 956 aa, Rhizomucor pusillus
MLSRYHTKQAPTTGEIPFPRLRDQSTTSKKNVIQAVEIDQDVLIANLEQVFDKIVRGSIRKLKNSPSELPGDESERLKTTNKIEKEVTKKKAKFLALKQLPAGPYGTSRKKLIKLSPSRLDRWKSFLNSNFDRINKDVEIQWSSIDDEKEDKKNTEAENNDDXDGSNXGITSVPXSSVLRPGLPEDYIEXFEETLGSTQELISDDIANLSAVIRATMLEFVAKNGTQFGLTQIIPDHALRDTSMLEQDKYISLNTSLVGAADTVLFDQQHIERLHSIYSGKMAATVQQRALGSIDCDYYIPDFYYLPSAPAGLSQTTNKAVHQYCTNLEQMKAKEKQERKIKVDSAAIRNFQRNRLREEKKYLQNENRIVQAKDSDEEEKWSSRRYKCQQRIYAINENWQKRLKNQAQDRKNLQSDTNEADNDDDTIRIVSRLLRDGIEEGSIVEILEECNEEDSPDKDTPGIDEEQDDQKHRNDVIKQHISETCSNDFELQSQEIQAVKTIVNLLRPFVRESNGKQHRSIADALPFVVFANTVLAICGYQEFTTQISPLVSAGRIQSLTLDATSIYEMFISNAGRFNLCTYSGEEITNIRKARENKELMMGAFLDIDKMDKICNESGLIFQNRALLTSFGVIRLLDKRKHEKQACATYKTQISQGQDNDNIDIEALKTKIAELEAAYKLQQKERKRNIKAFAALDDTELDGNMAPDTTAESPDTNDGGNFIAYVATSRFNCITAAQITEKSLCNKHTRLRQKRNRKPSCSRCWKANRREINTEGNGRKRCCHCTRSCMRVERSFEVFYQSSRAKKEKRSQEIATRLTYSKIAAEERSIIKSNTGKQQRAAVMCIGNQGTCVDSRIKGHARRDGKKLRRQHSQYAVVALTDEFRSSRTCPFCFGTVIRPKCKKKIKAIAGYTSLQGYTMQPFNRYAAASKLPTKNTALDPPGGAATAFADVQDDQH

SEQ ID NO: 4344 - protein, 477 aa, Rhizomucor pusillus
MYEMFASNNGCFDIYTSKDEKITNIRKARENKEVMIGSFLDIDKIKQIYEESDLQFQNRAILTSFGVVRLLGRKKHANQIPTSVDRTAGQQETKDDIFSIDLEVLNEEILSKEAVYKMQQKERKEAIAVCEHATVDMQQNDIRKFQELKELRLKRAWAITAAEETALELKDMRTIRGTDYGLQTMSTTVPMTADRMNYHLSLYNTFDMLSIADDEIPIDTRTDDTGTYVEIPKSICITAPQLNEKSLSNQHSRLRNRRKARNTAVQNAEKQSSEYSMKTASAAEDVSVAHRTDSEVFLSVTSGEKEKRNQELATKIAYSQVAAEERRAIKNDACDDKAIPVMSIGNQGTGIGSRLKGHTRRGGKKLLKEHCRYAVIATTDEFRSSKTCPFCFGPIIRQKRRLRIKDQYKMVTVNGSSICMNPDSAVCIAIAGYTNMQGYFLHCFHRYAASAMLLQKQRTHLHPSGDAGKASVEEQID

SEQ ID NO: 4345 - protein, 372 aa, Rhizomucor pusillus
MKDIKTFIEETSTELKNGTFRPLKYTNPRGARRFTLLPLYNFQARHVSMDLQAFSKLLLDSGLRIKKDGQVTQETAKQGNQIITDGYDLIFVFKKPKKEYQPQVPDSIGKSIDNPDTIVWSVDPGVTDIITSVDGVVDEPHRIRQTSANECYHLCGYNRTRIRETIESIEYRMKHHYNICEFYHREFRYNKLKFKSYVNKQKGLAEIAKRLLGGSDKYRPDREVTSHSLDFTRQNQGCHAESPWDTATEKEKPVVVAFGDGSFSGSMKGKITAPTKSVFHALKQYALQRKAPTFILKTDEYLSSQICPKCHTRSLQNLQDKTNSKIHAVLRCKTCSTVWNRDVVTALNIRRILIHMARSKSEKPAEFKRESK

SEQ ID NO: 4346 - protein, 327 aa, Rhizomucor pusillus
MHTFDKHERQKRATYLLISDKTGSGRSASILLPFLLVASGAFRAWCDGRIDGARLQAKKSLAFKKAQRLNEVLNRSFNALKDRLREKYARQWVSFTPVIKHAIIQQLDARRDTRCYTRDFANEDATIFIHEAPFEAYPETVPMDHKLANALYRRIKQRNRGCDSTNADIPTRVDEYLSSKMCCYCTKQGRKQRVDFLQRTPVVSEQDAARLDDGHEKVFRVVTCQNCNLVFHRDGNASDNLTSITRYMLRFQERPRWFIRPSSRQRTASDRGTTVISGSRGRPGEREIMASSGAPRRKRIASETETMVEPSWSPQQETPDSSSAPVS

SEQ ID NO: 4347 - protein, 237 aa, Rhizomucor pusillus
MTLSIQSAVDKAATRILKKAGVCSNAPTEQRDREGHRRQVMSEQAKQQALERQEERKQRRRKTAEKRENHVLIAIGKDGVLSSHRKGAVSPMDTRLASALIKCCKAEGHIVTAVDEYNTSKVCPRCITDRRTSYLQYLRCPPAASRHTDHATLDKDGNEEINVSPSAMCAKCIFHRDGVAAQSQALISASMLEHGQCRKPFIRPSRQLKPNTHPRQTCSILNLNSIFESQLIVLGVE

SEQ ID NO: 4348 - protein, 245 aa, Rhizomucor pusillus
GFADECHRIRSVSAKEYYDMCGFNKAAESRRNFGEHNPQTKKIINSIPSAKTASLERFKESAEYRIAKHDAILLYKEAEAFTEMAKCLTTGSNKYSPDNVAKANEEGSTKKKWRPLAPEDKTDETSIIIAFGNGAFASTMKGKRAVPTKEFRKASKQSPQLRNLGRLHFHINLPTKYTPAFSRKRKYCWCVNEKSQMTIHAVLSCNTCRTVWNRDHMAAMNIRGVFIHMQHNKNERPLAFKISSL

SEQ ID NO: 4349 - protein, 353 aa, Rhizomucor pusillus
SKTHILRYDGTPITDIKTATWHPKDVFWNFFDVDKIQILLQEQKRQPMWRLCYIDKYRIRVIGYKIVRANRKRKQKREKDAAQTKSVLTDEERDRIEQEMEELSSVLKKKKATAKMTLYLAPTFYLVKVRYKNSSMSTYKDNGTSELWGIDPGGVTTAMISPRSMRSLLEDINRFEALQEDTDQIADIDTDAERPRIRSGTRKEAVSKEPEKNSVIHFLGNWKPVNSRVKGRTCSGSLTKLEQTPKAPEPDKLYTIGEYNTTKTCGYCFKKIQIHKYRRDVRHTTCSRDAAAASNIALSGISRALSDDNQPLPCFRRGRSKDMRLSLTQKFQLDCGRTRLVTDRSLSRGKNLA

SEQ ID NO: 4350 - protein, 337 aa, Rhizomucor pusillus
MKDIKTFIEETSTELKNGTFRPLKYTNPRGARRFTLLPLYNFQARHVSMDLQAFSKLLLDSGLRIKKDGQVTQETAKQGNQIITDGYDLIFVFKKPKKEYQPQVPDSIGKSIDNPDTIVWSVDPGVTDIITSVDGVVDEPHRIRQTSANECYHLCGYNRTRIRETIESIEYRMKHHYNICEFYHREFRYNKLKFKSYVNKQKGLAEIAKRLLGGSDKYRPDREVTSNSLDITRQNQGWHAENPCDTVTEKEKPVVVVGDGSFSGSMKGKITAPTKSVFHALKQYARQGKKSSKPAGQDKFEDPRCTKVQNLQYGLESWCYGCSQYPSYSYTHGKKQE

SEQ ID NO: 4351 - protein, 341 aa, Rhizomucor pusillus
MGTKTATKLFALTPRPNFQWRFITINEKALRALTGIRSEHAFGEIFDLTKYRFLTNNDAMFTNQISTDGYAVHFQLVRASKKESIDLKLEAFSMSEMEEYFSVCSIDPGRKHVFTASYGYGEDEHETRRVSRKEYSAFIGSKNRTRALQKIKKANGIEKLNQDFRLARLPPIPCKPISAVRSTLLEENRPHKEKKWQRVKGVSTAKDKIPLIAIGDGMFGKDGVKIEGHASGIVGILYRMLKRREARGEAVIVTIDEYRTSQVCHSCLARSLRNVTTEDNISHHGILDCQNCGILWNRDVNASNNMYYIASRVWQGLARPEPFVRPTSNQPTTANVGPERV

SEQ ID NO: 4352 - protein, 730 aa, Rhizomucor pusillus
MATATAMQQRAFGSIDADFFNESFYYLPPAQAGVSQTINHAIHQYCKNLENMWADKLFSRSAEYVVRILLRLHWPPKKTSALQRLGFQKSKREKRVQGSVKISAIRNLQRNKLYEENKYLRKTESRIMQAGDEHEEARWFTRRYKCQRRIHAINEVWQKRLDRKPQDAIVQFAAGDSANHGWDERVSELLKHGLEEEEIIEILEQHEEDSTEEEEHTEEVISDQPEPSRKRLNRLKGICKSLLFSTTMVNEITEQDVTSACYDDLELSSKETQIIAFIANLLRPFLQASNGKKNRSIADTLPFVLFANTLLRTCRYPEFTAQISPTISPAKIQSLTLPTIDVSISIPPRMKKITNIRKTRENKEVMIGSSLDIDKIKRICEESGLHFQNRAILTSFGITSVDRTAGQQETKDDIFNMDLEVLNEETLSKEAVYKMQKKERKEAIAVCEHATLDMQQNDIQKFQELKELRLKRTWAIIAAHDPTKKKMVPTLRNFACESSPANITISTLEKEAYEARKPIVYSRTDYGLQMMSTTVPMTADRLNYHSSLYNRFDVLSIADDEIPIDTHTDDTGTYMEIPKSICITAPQLNKKPLSNQHSRLRNRRKTRKMAVQNAKTIKLRANQDGFSGLFISHLGRKKEKRNQELATKIAYSQVAAQERRAIKNDAGDDKAIPVMFIGNQGAGIESRLKGHTRRGGKKLLKDHCRHAAVATTDEFRSSKPCPFCFPSKKA

SEQ ID NO: 4353 - protein, 442 aa, Rhizomucor pusillus
MSRDIATYCCQEMATVYTNNIVENFQPRAVVYIQHKLDSFVPVRDVIKRKANNDYIYEWIAGGEPAELDIFAEAPLELILVIQEMKVLSMPLAPRPWTTKSMSATPGAFVPVLYAILQEYEREHVAAEYSLKPTSTLPKLFALTPIPKSNDVLYLSQEPSENPPFNLESMLSLANKWMTAYGCCEEQHEMRRVSRAEYSAMIGAKARNKRLHAQKKENGIEAIESGFTAKTTNIQRYNLYVQYLLVHETSLRQFYSQYHAHIRFPNLKGRNRAREELANIVINGGKKYNRKKRKKRAANQKKRTNYRKKRKKYREQRRRSTGSSPINSDQYVPQRTKDKMPLVFFGDGCLARIATESKAMKAVWLICHTCMSKSLQKLKTEDGISHHGILDCQTCGMLWNRDTNASKNMYFIAKNIWESSGRPEVFCRPNQSITANVEPERV

SEQ ID NO: 4354 - protein, 505 aa, Rhizomucor pusillus
MVITGSYPSREDGKCRERRFGNFFDGAKIHELCGTHGLQFEHCIDVTSFNVARLHGATKKGAPKACKKSFFTPTPLDGMEKDDLMTCIGTWEKRISALQERNKELNMRKHASIRTLSKAKQEGAKRADLKSLQLAKADAEYEALKNQLAFKDFRTAVYHAKWMMKNQDRKDGSGKEQSDLWDLSRLQKEAAESSRKLAFSGTDCGIVKTSVTVPISLQQYRHHIELYNRFQPLSTKEEDDDDDSYGNDELTSQRCNDLLTLPKPSTISSKHVYNKLMVYKNAKYREKRKARNPEVREAEENVANNNIHNAKSVEDVSNWQKVRKPSKMEPRAGPEKEYSQEASRERAYVKEACGTGKKSIPIMFIGDQGLGTNARLKGHVKVVASKIRKEHHLHTVVAMTSEYRTSQTCGWCLGPVVRPRATILKDGKEKRRSVHGASLCMNTKCPLYRAGRVIDGIHLSAFTRHPAALHMLNTSNSPDIIDNDAQEDSVEGTDIQSSLDGEVRK

SEQ ID NO: 4355 - protein, 387 aa, Rhizomucor pusillus
MRNVVIRVMLFVDIYIVQHAHSSIPTYVFSQQFFYSMAQPVLGQEITNDNPNLLDDLLDSWNSVKTQYPALIYPAMLKDMASKIANDYLYEILAGGNPVMLQYLLPCSIEIGNAIQEMWMELVPYMPRPCTTDEMAAKHGNFIPALHYILQQYHDEHQETPHIQELPRLISLVPLPSRNWRLIDINAETLAGLLKMPVPRIYNQRLTVFQTVFNLDKHRFFKLPSQPISAIRSTLDMEREQPPAKGKKWRKARVNCDNNGKMTLIVFGSGMFGKKDGVPLKGHQSGVVGILCRELKKREANGEVAVVKIDEYLTSQVRSNWQILCTMGSKSAKAVGPYGTETPMHPKICSTLRSAFGQVMGGVHLSSERISPLRMWDPNGFGSLRYR

SEQ ID NO: 4356 - protein, 232 aa, Rhizomucor pusillus
MEERNTTLRRENTGGETVENGKSKDEGESYLNENGESCRNKVIRRTNISEQMAKFPARTSRLPIQNESAVRSTLQEDKNKPDMKQKKWAKAKFTPNSEGKLPLVVFGNGMFGKDNVSMKGHWSGLVGVIYRMLKRREAREELVVVIIDEYLTSQICHNCQGRSLKNVSTADGVRHHSLQVCKNCGILWNRDTNACKNMFHIATSIWSGNGRPGPFVRLKQQITATNAGPGWV

SEQ ID NO: 4357 - protein, 311 aa, Rhizomucor pusillus
MVTTNGFQLSLXFARPAKSPXMELXLSDFKEEEIENYFMPCALDPGRRDIFQAAYGAQNTEHEIRRTSTREYYQWAGSPKRIENLKRTRKRNGIEEIESKFPSAKNADITRYSEYVRYLFLHLETLFTFYCFHNDAERRFRAYQGKQRAQEELVNVIINGGKKYDSAKRKHRMRNRRERKKNKVIRRTNISEQMAKFLARTSRLPIQNESAVRSTLQEDKKKPDMKQKKWAKAKFTPNSEGKLPLVVFGNGMFGKDNVPMKGHRSGLVGVLYRMLKRREARGELVVVIIDLPQLPREELEKCHNCRRRASP

SEQ ID NO: 4358 - protein, 601 aa, Rhizomucor pusillus
MKNATELNRNGRVKLCSEEEQSYSSQFKTQLKEARGKVDSLCLEIQEEEGTIALKQNKLYHLNRKLKGQDAPLPCSNNLSGEGLVQELLYEHLQGQRNVGITDINRFEALQEDTDQIVEIDTGVERCPKPVELKTGLIENASFRKVHRALRDQGQETNVKQARTREFLEKSFYQKFGSGIRKEAVSKKPEKKISVIHFLGSWKPVNSRVKGHACSGSLKKLEQTLKAPEPDKLYTIDEYNTTKTCGYCFKKIQIHKYRRDVRLTTCSRDAAAASNIALSGISRALSDDNQPLPCFRRGRTCCQFAPRWGDREANMAFVDSLLKRHGYGNGNYKFVQANVTVLVHRIERGQIDLLVLPEMAFTGYVFNSLDEIMPFLEDKDSGPSVQWAKKQAQQLECFVVVGYPEIEHKDKYYNSLCCVNPQGQVVATYRKTFLYKTDENWAAEGPGFQSQLIPGLGKVHPVLNFHSRKIVLEECFTWQVGFGICMDINPYRFEADFEAFEFANFHAREQSEIIICSMAWIRGQNVMDTIGYWAARVWPLREHCHLHSIPHMYFIACNRTGTERGVTFAGGSSILDLCGPKIRLLNYMDEDDEGIMIFDTK

SEQ ID NO: 4359 - protein, 731 aa, Pharnaceum exiguum
MVAAVPSSSSSPSCKRCGGTDHSRASSAKCAQRVLPQKRRFTVTSNDDANVNVTTYTVQVGFGKFCRDRGLRELIAADVFEVSALAVEASVYVHYHYTKLLHENGDSDIFTTTKFTQNHLLDFYYHLQGKRQRKERVPLDEEYFAMREKHGLQRIYDGKLRTFLIQSIAVQHETAMKNCVCVHLYDRVVRYLYLKHERKTAKWVWKCRVYEELFSRDRQTVRSLEIIEMLESFGLPADYRGFLDSENDWWRLVPFSHRLATWFERNGSRSFSVFPVFRPGPKHLRYNARALHELLRSVKPSECTSDIYEFMNTTPAYWWRYFDLSGKRYGQLDTKTNAIAAYRDRTKFGMSFTTNGAYCCVAMERFVPKNNDSVGLKSKRSKRKQTENNDLSVDLSKFSGFLGLDPGVVNYVGACYLDNGNVDRKRNYTLKTAKFKQSECKERVIKRRREKLIGRYERELFRCRKESEKMTSKCCSEYADTVAYTAYRLRHHEQSHLRYSRRKLVKLAWFGKMCKRSAEDSLVQRLLDMNTDKTNVLVCFGDGSLRDGVSYGSNRKPAVCSLRRAFHRRRDRCAVADVDEYMTTQCCSRCTGRMAMPPKHDKEQQQQQNTGDEMTIGRRRRHDHRFQFCQKCGITWNRDVNAARNIAMVARRLTKSVVPDYAYDSAMSPIKAEQQSDGDADHESSTMDSLETLVPRLRQQKPRYYHLKHRIEKRSVLDYVKFLMNLIGNTA

SEQ ID NO: 4360 - protein, 335 aa, Odontarrhena argentea
MLAERKEAYEKHKDDKDQLKKQKLPTPAKYKAEFEWLKEVDSLALANAQLNLQTAYKNFFCGQNDFPTFKSKKDRKSYTTNVVNGNIMLLNGHIKLPKLKMVRIKQHREIPQGHIIKSCTISMTPTGKYYVSILTEYEKEIVQKEVETVVGLDFAMDQLYVSSEDERANYPKFYREILDRLAKAQRVLSRRTKGSGRWNKQRIRVAKLHEKVANQRKNFLHHKSKELATHFDVVAIEDLNMKGISQALHFGKSVADNAWGMFTSFLAYKLNEQGKQLVKIDKWFPSTKTCSSCGNVKNMSLSERVYSCICGVNLDRDYNAAINIKNEAIRLLALA

SEQ ID NO: 4361 - protein, 445 aa, Ormyrus nitidulus
MRDYAEGKDPLAIRVDFTKYFYGLRDKPPKARGKRSDSRRNETFDANEYQLDTNYAALRRECGLSKFPDSRYKQNQIQFAITGFSTAFHNNLWMHAYRRLRRFLDGKIKTENLDISRSVVYIFLQKCFLKEKKPLAWENEHESRLAQFIRQDLSYDALEGLYDIRDKGKYGKYFRLFYNLQRWNERQGLRNFSLVPQLRHGRHHTTLDTRAMGDILARLKLAAKKFGKDDWSGVLKFGDLERGKKFHRSIQTDGVALSLAMEKPKMMEGKKKINRVKCETLLEKIRAQSHAYEKIIGLDPGLRLMMDGVAKRRDELDTRQGRLIKLSSAHFRHLTGENQRRQKLERWTGDSKVETHSESPMSADYEAYTRRLLGEFEAKQAKFEERRVARLKFDKYRRTEQAAHKLAQKIVEKDEGKALIIVGSSKIAANSPIRSYVRVAQSRLL

SEQ ID NO: 4362 - protein, 336 aa, Arapaima gigas
LLNKQSRAVNYVWHFCNDTQKHAPKWNKRWPTGFDLNVPTTGSSKELGIHSGTVNATCEQYAKSRSQHRRPWLRYRSRKSLGWVPLKGRDLKREGDAFRFAGNTFRVFNSRPLPEGKIKDGTSFAQDARGNWFLNIVIEMPDVHARPIRSGVGIDLGLKDFATLSTGEKLPNDRFGRCAAEKLAKAQRARKHKRHIAKLRAKVANARTDFQHKLALDLVRRFDYIVVGNVSAAKLARTRMARSVYDASWSSFRNKLRYKAIAHGVTFEEVDESGSTQSCSACGSKDSSTRPKGIAGLRIREWACSDCGVEHDRDTNAALNILRCGRASPGVGINCL

SEQ ID NO: 4363 - protein, 353 aa, Arapaima gigas
MAGMILVYRYRVKSLNGLLNKQSHAVNYVWNFCNDTQKHALKWRKKWPTGFDLNVLTTGSSKELGIHSGTVNATCEQYAKSRSQHRRPYLRYRGKKSLGWVPLKGRDLKREGDAFRFAGNTFRVFNSRALPEGKIKDGTNFAQDARGNWFLNIVVDMPDVQARPIRSGVGIDLGLKDFVTLSTGEKLPNDRFGRRAAEKLAKAQRARKHKRHIAKLHAKVANARADFQNKLALDLVRRFDYIAVGNVSAAKLARTRMANSVYDASWSSFRNKLRYKAIAHGATFEEVDESGSTQSCSACGSKDSTTRPKGIAGLRIREWACSDCGVLHDRDTNAALNILRCGRASPGVGISRR

SEQ ID NO: 4364 - protein, 406 aa, Hippocampus kuda
MAMHCDHARFVWNLALEQYGHAQVVGHERWAWDATISGRKPNDPWSKRVANSRIKVVFDQYQRDLADARQGSWLGEGSSSVQQVALRDLRQAFQNHWNNPAHFGKPTWRSKNQGSQGFTVRDVTVRKLSRRWAEVTVPKAGRVRFRLSRPIPAEHGMGRVTLDRAGRWHVSFSAPQPEIDRQSTGAAVGVDRGVTDSIATSDGQLDRCPGLNRQEAARKKRLQRRMARQVPGSNRRKATKRAIAKLAAREADRRKDWLERTSTRLVRDYDVIAMEALNVKAMMASASGTVDQPGRNVVQKRGLNRAIAAQGWSMLATRTRQKAEASGVAYVEVPAAWTSQWCSCCGGIGDRSGKVFRCDRCDVVVDADVNAARNVRAAGLAVLGREGDGAVRPPDAASTSRIEAHS

SEQ ID NO: 4365 - protein, 607 aa, Ectocarpus sp.
MSRYTGSFRYIVGLFSNYVVIRRLEQGLQPPEVKKVFYDRCWAAINIRISGKNTRNDFSDLLDEFIDQSGFDTSLFPPKVPCRLQETVTREMEVSAKNSIVVHLEAKIKGFLRFRLMNDSQLAFQHLPAKDRSRIIVSLSNDCLEREMREDLDPGYVPHVLQVRDLLAQVYSTEPDVPVLKILKKKPHLFLELISMISRVAEEASDNNRALREETKTRSDEEKVRKAFYISERIKRGLVDRPKMCTVLPVWKLAPCFPYYSSSVVGSIFHKEGHDFSSVSRFISEHFDLRRVNRKGYKPSGFRSDGYQVQVTFMALVSKKPHVPGTTDLAKSGYQIAKKVVSLETQERGLFVLSQARKDSRKIVADRVHAYNLTVVDPGCASVVSVRSCPLEFCRCVGSVREKSTDWEMKGTEYSVKSGRTMLEGREKKRRSNDEYGRCFPRFSAVKKKTARKSSFLAYCRVAAETFKVMFAEKMKRARKRSRFHSSRLVQKTVDKLASNIAACPSDRKNIVLFGNGSFRAMKGHASAPRKKLVRAICSRVNVGMLDEFRTSKMCPGGCGGEMTDVQGGREGRTVERVTEATWQTGSGQATDSVAGSLIFLATLFLD

SEQ ID NO: 4366 - protein, 797 aa, Ectocarpus sp.
MATELCVKDGIRVTCEEVVSESNNLGVEVVDGADVFGIGSADATGLPVVTGDISDARKPDNLIDAEEAEAAKRLRIKMMKLKEERAVAAVGGGANVSGAATVPVVADGLSDAAGVKSGASSGVGGDEKGIWRGENGAPSGKERGTEDKTKKKYKPPKQVSPDESDGVRAVVAALRKAFAQAKLRNNDAKAAGKQEDDVHKRLEQGLQPPEVKKVFYDRCWAAINIRISGKNTRNDFSDLLDEIIDQSGFDTSLFPPKVPCRLQETVTREKEVSAKNSIVVHLEAKIKGFLRFRLMNDSQLAFQHLPAKDRSRIIVSLSNDCLEREMRGDLDPGYVPHVLQVRDPLAQVYATEPDVPVLKILKKKTHLFVELISMISNVAEEASDNNRALREETKTRSDEEKVRKAFYMSERIKRGLVDRPKTCTVLPVWKLAPCFPHYSSSVVGSIFHKEGHDFSSVSRFISEHFDLRRVNRKGYKPSGFRSDGYQVQVTFMALVSKKPHVPGTTDLAKSGYQIAKKVVSLETQERGLFVLSQARKDSRKIVADRVHANNLTVVDPGCASVVSVRSCPLEFCRCCRERSRESTDWEMKGTEYSVKSGRTMLEGREKKRRSNDEYGRCFPRFSAVKKKTARKSSFLAYCRVAAETFKVMFAEKMKRARKRSRFHSSRLVQKTVDKLASNIAACPSDRKNIVLFGNGSFRAMKGHASAPRKKLVRAICSRVNVGMLDEFRTSKMCPGGCGGEMTDVQGEKDKEYKAGDWFTKHTVYGVGKYPKGFEELVQKVENQTDGFRWSSWRQDGE

SEQ ID NO: 4367 - protein, 308 aa, Tetradesmus acuminatus
MEKQMHAAAVEFVTDVRRQLGLPDAGAKLTESYAKRNQQHMLLFLAWLQRRVEALGGKGVRLCPVFSVRRQHVQLDCTTLLHMLSGMRLVPEHLMVKQGEATDWEGVLDLVAGVFEPPCPAKQKGKLQWCTIVHAATQVQGTRTLEWTLPRKRYRLESGLAQAQAKARRWDTAMIGGAWKQMNQQGGALRSSSLQQLTQHIAAYNSAAEEWWTSAMQRKRAKLRFRTYGGRKRCLDRFFSGLERDVTAAEPNKRLAIAYECSKFLNRDRSAALNIRFLFTQTQLLGCSMPTQFVARRKQKKPKRNQAS

SEQ ID NO: 4368 - protein, 937 aa, Autographa gamma
MPCPSCGKDDHQRSSSAKCTNRKRRIRETELSANQEVSVYSVKKGLTSIVCPLGNKRDMILKTIRDDVKELSRLSIELSYLINHFYKRYASREDFYILFPKFEALQFTYVLKGAQHKLNDPENVLDEYLSNRAKRFYDCKLRSFNIMQIAINYSTMLETNISVHAFKRLKRYMHLKCGDKLNKSEIHASTYDAYYNKVHRSNEIGEWFAMNKIDSGDVKQNFWKHIRLFIKIQEDLNQSNQKSFSVFPIYSNGLLHITYDTRCIHELLRRVDPANTPSAWSKFSEDPKSYWARHFIIPPKFGYSIATDGVSVSMSMNRIVSKGTKFKSKKVKKVEDSIENLKAKSNSYSKIISVDPGAKTPIVTCTRSVDGGFEYRVLKKERVVYESKELHREKKRSKFIKDIEDRIKLDREKVEHETGVIITTKSADICEYTRFQLKWFDEKQKVYEQRRLQRLKFDKYINDQKMLHKLVDEYFGKEPDTLVVYGAGFDFMNTGTFKGHRKFRHNDVLKIIRQRKNLSVFIINEAFTTKNCSKCYESGLKNHLHVSKSPHRYVYCSVEPEPGKGIIRYALSDRTFIDKGWTMLPTEKVVRKMNVYRMRPAHPEFDWFEHNKNKRLMTYDTGEKLAEFDDNGRGRWYYRNGRLALDYYDAEETNAQQRFVIYSSGEPDERGRSHPITILATFDYLGNGIVFDHAGKIRLKYNQTEGVVLDRGIGPVSHWKWHTLNDPPVLQQVMIDTQMAHKDPQIIKLGTAADNKIRPDNEEMLAIEFDNFIKEKSKKLSQKFKPFQIKMKALKINEHFSLKVLDQATVYLIFRDGSTNLKLNIGMILDHQEIVDTDTAEVGEVSNNLERFPARTDSLAGLQRSVAYAQRYERTRTERERRLRPAEPCESADQLTAAASPPLRPPLRTVPTGSTSSAANCRCRKPTNNLYYNTRLL

SEQ ID NO: 4369 - protein, 601 aa, Autographa gamma
MPCPSCGKDDHQRSSSAKCTNRKRRIRETELSANQEVSVYSVKKGLTSIVCPLGNKRDMILKTIRDDVKELSRLSIELSYLINHFYKRYASREDFYILFPKFEALQFTYVLKGAQHKLNDPENVLDEYLSNRAKRFYDCKLRSFNIMQIAINYSTMLETNISVHAFKRLKRYMHLKCGDKLNKSEIHASTYDAYYNKVHRSNEIGEWFAMNKIDSGDVKQNFWKHIRLFIKIQEDLNQSNQKSFSVFPIYSNGLLHITYDTRCIHELLRRVDPANTPSAWSKFSEDPKSYWARHFIIPPKFGYSIATDGVSVSMSMNRIVSKGTKFKSKKVKKVEDSIENLKAKSNSYSKIISVDPGAKTPIVTCTRSVDGGFEYRVLKKERVVYESKELHREKKRSKFIKDIEDRIKLDREKVEHETGVIITTKSADICEYTRFQLKWFDEKQKVYEQRRLQRLKFDKYINDQKMLHKLVDEYFGKEPDTLVVYGAGFDFMNTGTFKGHRKFRHNDVLKIIRQRKNLSVFIINEAFTTKNCSKCYESGLKNHLHVSKSPHRYVYCSVCRKGIHRDKNGAKNILLKYEYTKLPNSLSSIGTDMNRTDGGSS

SEQ ID NO: 4370 - protein, 601 aa, Autographa gamma
MPCPSCGKDDHQRSSSAKCTNRKRRIRETELSANQEVSVYSVKKGLTSIVCPLGNKRDMILKTIRDDVKELSRLSIELSYLINHFYKRYASREDFYILFPKFEALQFTYVLKGAQHKLNDPENVLDEYLSNRAKRFYDCKLRSFNIMQIAINYSTMLETNISVHAFKRLKRYMHLKCGDKLNKSEIHASTYDAYYNKVHRSNEIGEWFAMNKIDSGDVKQNFWKHIRLFIKIQEDLNLSNQKSFSVFPIYSNGLLHITYDTRCIHELLRRVDPANTPSAWSKFSEDPKSYWARHFIIPPKFGYSIATDGVSVSMSMNRIVSKGTKFKSKKVKKVEDSIENLKAKSNSYSKIISVDPGAKTPIVTCTRSVDGGFEYRVLKKERVVYESKELHREKKRSKFIKDIEDRIKLDREKVEHETGVIITTKSADICEYTRFQLKWFDEKQKVYEQRRLQRLKFDKYINDQKMLHKLVDEYFGKEPDTLVVYGAGFDFMNTGTFKGHRKFRHNDVLKIIRQRKNLSVFIINEAFTTKNCSKCYESGLKNHLHVSKSPHRYVYCSVCRKGIHRDKNGAKNILLKYEYTKLPNSLSSIGTDMNRTDGGSS

SEQ ID NO: 4371 - protein, 212 aa, Hypena proboscidalis
MIIRKLSLLYISDQDIEDRIRIDREATELETGITLTPKSCNVKAYTRFQLKWFEEKQRVYEQRRLQRLKFDKYINEQKTLNKFVDEYFGEAPDTLVVYGAGFNFMNKGTFKGHRKFRHNEVLKIAKQRKNLTVFVINEAFTTKNCSYCYESGAKNTLLVSKSPHRYVYCSVCRKGIHRDKNGAKNILLKYEYTKSPVGLSSSGTDMNRMDGH

SEQ ID NO: 4372 - protein, 601 aa, Hypena proboscidalis
MVCPSCGKNDHQRSSSAKCLNRKRRIRETGLSDDQEVSVYCVKKGLTSVLCPLSDRKDALLATIRDDVRELSRLTIELSYLINYFYKQYSDRDDFLKLFPKLDALQFTYVLKGAKYKIPDPDNVISEYLSARGSRTKLYDGRLRSFNIMQIANQYSTSLETNIKTHAFKRLKRYMYHKFGEEMDKSEIHASTYDAFYNNMRRPNQIGRWFDEKTTTVEIDRNFWNHIPLFIKIQKELNECSKTSFNVFPLYSHGLKYISYDSRGFHELLRRVDPINTPSTWTKFSENLALYWRRHLTLPSKFGFNFSTDGVCISLSMNRIVAKGTKFKSKRVKKEESSHENTLSGAGKNYSKIISVDPGAKTPIVTCTRANDGSFIYKILKKECVVYESKEHHRTRKRLRLIKDIEDRIRIDREATELETGITLTPKSCNVKAYTRFQLKWFEEKQRVYEQRRLQRLKFDKYINEQKTLNKFVDEYFGEAPDTLVVYGAGFNFMNKGTFKGHRKFRHNEVLKIAKQRKNLTVFVINEAFTTKNCSYCYESGAKNTLLVSKSPHRYVYCSVCRKGIHRDKNGAKNILLKYEYTKSPVGLSSSGTDMNRMDGH

SEQ ID NO: 4373 - protein, 802 aa, Hypena proboscidalis
MPCSSCGKDDHLRSSSSKCLKRKKRVRETDLTEDQEISIYCVKKGINSFICSLYENRLELLKLIRDDVKQLSRLSIELSYLINYFFKSYHAHEDFHKLWPKFDPLQFTYVLKEKELKQNFWKFIPLFLDIQHELYEKDKKSFNIFPIYTHGLKYITYDSRCLHELLRRIDAKNVPSTWVQFAEHDPKVYWRRYFNVPKNFGWSFSTDGVCVSLSMNRLIPKKDKFKAKRLKKEEASSENDNQLLYKKYKKIIAVDPGAKTPIVTCSRRKEDDTFEYKVLKNTKVIYETKEHAREKKRLKFIKDVDLKIRKDRESLEIDISRKSANVEDYTKFQLKWFDEKQKFYEQRRLQRLKFDKYINDQKTNHKIVDEYFGRETDTLVVYGAGFDFMNKGTFKGHRKFRHNDILKIIKQRKNLSLYIINEAFTTKNCSKCYENEERQNILHVSKSPHRYVYCSVCRKGIHRDKNGAKNILLKFEYKQNKLPVIPSFTGADMNFASGGSSSTCINGLICRFLSSAEVSTALRPFYFSVHPDLFGKYPEQRKINESSLQQLSALLEAQQSSKRMSVPPLPFYLRQKNKPIGEFKLVNIQLNSADVRETIVKVLNACDMSTTYVDKIPKSPKKKTDFSKFDYAKAQQYSEDLERAAFIKRKVKEKKAITNIVEWVFENSSLGKQKFESAGATRNQVKSLIDQLLKDYGIKEVKYDRGWNISHIRGALQSLVFLATQHSANMVNLKGRTIALGQFTGVSLDGDVFLNIIDVRNEWLSLINKVDQEDSALHMIPMYEKTLSSILRGIHICRRYYK

SEQ ID NO: 4374 - protein, 548 aa, Hypena proboscidalis
MVCPSCGKNDHQRSSSAKCLNRKCRIRETGLSDDQEVSVYWVKKGLTSVLCPLSDRKYALLATIRDDIRELSRLTIELSYLINYFYKRYSDRDDFLKLFPKLDALQFTYVLKGAKYKIPDPDNVISEYLSARGSRTKLYDGRLRSFNIMQIANQYSTSLETNIKTHAFKRLKRYMYHKFGEEMDKSEIHASTYDAFYNNMRRPNQIGRWFDEKTTTVEIEKNFWNHIPLIIKIQKELNECSKTSFYMFPLYSHGLKYISYDSRGFHELLRRVDPINTPSTWTKFSENFALYWRRHLTLPSKFGFNFSTDGVCISLSMNRIVAKGTKFKSKRVKKEESSHENTLSGAGKNYSKIISVDPGAKTPIVTCTRANDGSFIYKILKKECVVYESKEHHRTRKRLRFIKDIEDRIRIDREATELETGITLPPKSCNVKAYTRFQLKWFEEKQRVYEQRRLQRLKFDKYINEQKTLNKFVDKYFGKAPDTLVVYGAGFNFMNKGTFKGHRKFRHNEVLKIAKQRKKLTVFVINEAFTTKNCSYCYESGAKNTLLV

SEQ ID NO: 4375 - protein, 263 aa, Hypena proboscidalis
MNRIVAKGTKFKSKRVNKKEESSHENTLSGAGKNYSKIISVDPGAKTPIVTCTRANDGSFIYKILKKECVVYESKEHHRTRKRLRFIKDIEDRIRIDREATELETGITLTPKSCNVKAYTRFQLKWFEEKQRVYEQRRLQRLKFDKYINEQKTLNKFVDEYFGEAPDTLVVYGAGFNFMNKGTFKGHRKFRHNEVLKIAKQRKNLTVFVINEAFTTKNCSYCYESGAKNTLLVSKSPHRYVYCSVCRKGIHRDKNGAKNILLK

SEQ ID NO: 4376 - protein, 334 aa, Hypena proboscidalis
MYHKFSENLTKAIIHKSTFEAFYKNTYIDNEIGNWFKIHKISEKELKQNFWKFIPLFLDIQHELYENDKKSFNIFPIYTHSLKYITYDSRCLHELLRRIDAKNVPSTWVQFAEHDPKVYWRRYFNVPKNFGWSFSTDGVCVSLSMNRLIPKKDKFKAKRLKKEEASSKNDNQLYKKYKKIIAVDPGAKTPIVTCSCRKEDDTFEYKVLKNTKVIYETKEHAREKKRLKFIKDVDLKIRKDRESLEIDISRKSANVEDYTKFQLKWFDEKQKFYEQRRLQRLKFDKYINDQKTNHKIVDEYFGRETDTLVVYGAGFDFMNKGTFKGHRKLDIMIF

SEQ ID NO: 4377 - protein, 500 aa, Hypena proboscidalis
MPCSSCGKDDHLRSSSSKCLKRKKRVRETDLTEDQEISIYCVKKGINSFICSLYENRLELLKLIRDDVKQLSRLSIELSYLINYFFKSYHAHEDFHKLWPKFDPLQFTYVLKEKELKQNFWKFIPLFLDIQHELYEKDKKSFNIFPIYTHGLKYITYDSRCLHELLRRIDAKNVPSTWVQFAEHDPKVYWRRYFNVPKNFGWSFSTDGVCVSLSMNRLIPKKDKFKAKRLKKEEASSENDNQLYKKYKKIIAVDPGAKTPIVTCSRRKEDDTFEYKVLKNTKVIYETKEHAREKKRLKFIKDVDLKIRKDRESLEIDISRKSANVEDYTKFQLKWFDEKQKFYEQRRLQRLKFDKYINDQKTNHKIVDEYFGRETDTLVVYGAGFDFMNKGTFKGHRKFRHNDILKIIKQRKNLSLYIINEAFTTKNCSKCYENEERQNILHVSKSPHRYVYCSVCRKGIHRDKNGAKNILLKFEYKQNKLPVIPSFTGADMNFASGGSS

SEQ ID NO: 4378 - protein, 616 aa, Hypena proboscidalis
MKSSPINCLQVECGDPPLRLRRQYLSDRFVFRCQQFVNHPLSKRVADLSEEVATSRYWSKRSAPCLVESLSKWKAIEAPAHQSELLPIFHCNYHELVLFPNIQYNIVSFAWVPAHCGISGNEKADLLAKDAVVCGDIFPYLNYHHDLSTLPRVYLKESWNKFWAEYNLKGKFYRSIQHNIPAKPWFSKCLFNKLVTSIIIRMRLGHNCTQSHLARINVINSPDCPCGTEKELKQNFWKFIPLFLDIQHELYEKDKKSFNIFPIYTHGLKYITYDSRCLHELLRRIDAKNVPSTWVQFAEHDPKVYWRRYFNVPKNFGWSFSTDGVCVSLSMNRLIPKKDKFKAKRLKKEEASSENDNQLYKKYKKIIAVDPGAKTPIVTCSRRKEDDTFEYKVLKNTKVIYETKEHAREKKRLKFIKDVDLKIRKDRESLEIDISRKSANVEDYTKFQLKWFDEKQKFYEQRRLQRLKFDKYINDQKTNHKIVDEYFGRETDTLVVYGAGFDFMNKGTFKGHRKFRHNDILKIIKQRKNLSLYIINEAFTTKNCSKCYENEERQNILHVSKSPHRYVYCSVCRKGIHRDKNGAKNILLKFEYKQNKLPVIPSFTGADMNFASGGSS

SEQ ID NO: 4379 - protein, 601 aa, Hypena proboscidalis
MVCPSCGKNDHQRSSSAKCLNRKRRIRETGLSDDQEVSVYCVKKGLTSVLCPLSDRKDALLATIRDDVRELSRLTIELSYLINYFYKRYSDRDDFLKLFPKLDALQFTYVLKGAKYKIPDPDNVISEYLSARGSRTKLYDGRLRSFNIMQIANQYSTSLETNIKTHAFKRLKRYMYHKFGEEMDKSEIHASTYDAFYNNMRRPNQIGRWFDEKTTTVEIDRNFWNHIPLFIKIQKELNECSKTSFNVFPLYSHGLKYISYDSRGFHELLRRVDPINTPSTWTKFSENLALYWRRHLTLPSKFGFNFSTDGVCISLSMNRIVAKGTKFKSKRVKKEESSHENTLSGAGKNYSKIISVDPGAKTPIVTCTRANDGSFIYKILKKECVVYESKEHHRTRKRLRLIKDIEDRIRIDREATELETGITLTPKSCNVKAYTRFQLKWFEEKQRVYEQRRLQRLKFDKYINEQKTLNKFVDEYFGEAPDTLVVYGAGFNFMNKGTFKGHRKFRHNEVLKIAKQRKNLTVFVINEAFTTKNCSYCYESGAKNTLLVSKSPHRYVYCSVCRKGIHRDKNGAKNILLKYEYTKSPVGLSSSGTDMNRMDGH

SEQ ID NO: 4380 - protein, 350 aa, Apotomis turbidana
MIKRGDASFIIFPQPSHGLKHVTYTSKGWHELLRRVDPTSTPSDWTKITDHRQELWAPYLDSKTIDMKKFGCTVQTDGCSVSISMSRRMITTKKENLKKFKASYDRTVAVDPGSRVPIAACDDRYGFKRITKKWIRSHTLEWKRDRVRKKLLEKSETDERLDRERIQKELEVVLTPKSSSGAAHYATFRLKWFEARQKPFETHSKLTRLKLDAYINVTRTNERIVREVFLRYTPSDRVLVLYGAGSKFMNRATFSGRKFGHDDLLKKLRAKRNITVETVNEAYTSQACSACNARDGSFHRLKIDHRLRRGVCPDCNGAPLDRDYNAARNILINHTRSTFCRPSFAKYGGA

SEQ ID NO: 4381 - protein, 617 aa, Apotomis turbidana
MGERVATSAEDTLVRYDNPVLVTKKLEKAPVGVAAAAAQPCIPTEAKRETEEILNAILPPKEWEEEGQIWTQKIASTPATRLDVINLQEMLDTLLQQRQARETGINTGMYVICTGIVGDVLSDFVMTVWLGDDKLRRERLAAPEDRLYSLCSTVMVCKSCGGTDHQRRSSKLCKNHLAPIRKRGVEDELHDVEVVLTQSTRTHLTTHAYSRLVRYFKVKRSDRRLNDAFFEKRYTSDEDELNAVCRVINVDSPWYTTIPEWLRIQEAMIKRGDASFIIFPQPSHGLKHVTYTSRGWHELLRRVDPTSTPSDWTKITDHRQELWAPYLDSKTIDMKNFGCTVQTDGCSVSISMSRRMITTKKEKLKKFKASYDRTVAVDPGSRVPIAACDDRYGFKRITKKWIRSHTLEWKRDRVRKKLLEKSETDERLDRERIQKELEVVLTPKSSSGAAHYATFRLKWFEARQKPFETHSKLTRLKLDKYINVTRTNERIVREVFLRYTPSDRVLVLYGAGSKFMNRATFSGRKFGHDDLLKKLRAKRNITVETVNEAYTSKACSACNARDGSFHRLKIDHRLQRGVCPDCNGAPLDRDYNAARNILINHTRSTFCRPSFAKYGGA

SEQ ID NO: 4382 - protein, 570 aa, Apotomis turbidana
MVCKSCGGTDHQRRSSKLCKNHLAPIRKRGVEDELHDVEVYVVKRGLRSALCPLLDDLMTNRLLREIRSDVAELSRIYIKLGIFIDFYFKTVNCDASIKSFQDMLNFVYALKGKGPYAEAYARMIEGHHVSSYDGRLRSYIVQELAKQYWTVLKTNLTTHAYSRLVRYFKVKRSDRRLNDAFFEKRYTSDEDELNAVCRVINVDSPWYTTIPEWLRIQEAMIKRGDASFIIFPQPSHGLKHVTYTSKGWHELLRRVDPTSTPSDWTKITDHRQELWAPYLDSKTIDMKKFGCTVQTDGCSVSISMSRRMITTKKENLKKFKASYDRTVAVDPGSRVPIAACDDRYGFKRITKKWIRSHTLEWKRDRVRKKLLEKSETDERLDRERIQKELEVVLTPKSSSGAAHYATFRLKWFEARQKPFETHSKLTRLKLDKYINVTRTNERIVREVFLRYTPSDRVLVLYGAGSKFMNRATFSGRKFGHDDLLKKLRAKRNITVETVNEAYTSKACSACNARDGSFHRLKIDHRLRRGVCPDCNGAPLDRDYNAARNILINHTRSTFCRPSFAKYGGA

SEQ ID NO: 4383 - protein, 262 aa, Apotomis turbidana
MITTKKEKLKKFKASYDRTVAVDPGSRVPIAACDDRYGFKRITKKWIRSHTLEWKRDRVRKKLLEKSETDERLDRERIEKELEVVLTPKSSSGAAHYATFRLKWFEARQKPFETHSKLTRLKLDKYINVTRTNERIVREVFLRYTPSDRVLVLYGAGSKFMNRATFSGRKFGHDDLLKKLRAKRNITVETVNEAYTSKACSACNARDGSFHRLKIDHRLRRGVCPDCNGAPLDRDYNAARNILINHTRSTFCRPSFTKYGGA

SEQ ID NO: 4384 - protein, 570 aa, Apotomis turbidana
MVCKSCDGTDHQRRSSKLCKNHLAPIRKRGVEDELHDVEVYVVKRGLRSVLCPLLDDLMTNRLLREIRSDVAELSRIYIKLGIFIDFYFKTVNCDASIKSFQDMLNFVYALKGKGPYAEAYARMIEGHHVSSYDGRLRSYTVHELAKQYWTVLKTNMTTHAYSRLVRYFKVKRSDRRLNDAFFEKRYTSDEDELNAVCRVINVDSPWYTTIPEWLRIQEAMIKRGDASFIIFPQPSHGLKHVTYTSRGWHELLRRVDPTSTPSDWTKITDHRQELWAPYLDSKTIDMKNFGCNVQTDGCSVSISMSRRMITTKKEKLKKFKASYDRTVAVDPGSRVPIAACDDRYGFKRITKKWIRSHTLEWKRDRVRKKLLEKSETDERLDRERIEKELEVVLTPKSSSGAAHYATFRLKWFEARQKPFETHSKLTRLKLDKYINVTRTNERIVREVFLRYTPSDRVLVLYGAGSKFMNRATFSGRKFGHDDLLKKLRAKRNITVETVNEAYTSKACSACNARDGSFHRLKIDHRLRRGVCPDCNGAPLDRDYNAARNILINHTRSTFCRPSFTKYGGA

SEQ ID NO: 4385 - protein, 570 aa, Apotomis turbidana
MQRARASFTILVSSKNTDHVLEYTVFRMQWFDAMHAPYEKHSKLTRFGLDKYMRTAKCQERIVKEVFDGGGVENVLVLYGAGSKFMNVASFSGRKFKHDALLKKLHSKANITVEIVDEAYTSQACSACNERTGAFIKIGMDRRLRWGTCPVCHSQFDRDANAAKNILVNHISGIVRVLIHNGFLHGGDWRDCDSRSGLAYSRLLCETAEQMQAHIKRFAVGFNATKTQACLFSAKRSPFDLTPTFQGVSVPISDHLELLGMTLSSNLNFGQYIESLATTAAKKLGILSKWAICRATEWIPDEELHMNSKHVGPFLTVFTLTIKEHVIARTSAGFWSDQTRTIHEVCNSCPFVLSNGKHSIEVIDALTAELLDMDVISDKFEPMSPGVIDHVWGFFSGVRQRGMQTMEEMLRDGSYITAVGELSGPPGALKIQPPRDGLPLYLTTATKSSLLKRLASSRDFLRVLVVIFGTVAVLASSRIAYKYIARRRRRAREEGVKKQLAAGRRERRARARDKDLGEAQLCVVCAENPKEIILLPCGHVCLCEDCSDNIIDNCPICRERIESRAPAFIT

SEQ ID NO: 4386 - protein, 492 aa, Apotomis turbidana
MPGCKACGGADHLRRSSVKCARHLPPIRKRKLESGCDVQVYVVKRSLGSLLCPLLDGPQRTRLLEEIKRDVRDLSRLYIELGIFHNLYMKTTQALPPKPDVLQFVYAMKGKGPYAAEYFGTGRRYDGKLRSYTVQELAKQYETILHTNICTHAYSRLARYFRVKRNDERLYNAYFKKVMPEEDEISREIARVCATINGDTVKGPRWWPTISEWMRIQDAMKIRSFRLFPQPSHGLKHVTYTSRGWHELLRRVAPETVPGDWTAITDHLRQLWAPWLDLPSNTKFGCCLQTDGISVSASMNRIVKEKKVLAKLIKKPYDRIVAVDPGSRIPIAAVESKRFAFKRITKKYDVIQRARASFTFPVSSKNTDHVLEYTVFRMQWFDAMQAPYEIHSKLTRFGLDKYMRTAKCQERIVKEVFDGGGVENVLVLYGAGSKFMNVASFSGRKFKHDALLKKLHSKANITVEIVDEAYTSQACSACNERTGAFIKIGMDR

SEQ ID NO: 4387 - protein, 570 aa, Apotomis turbidana
MVCKSCDGTDHQRRSSKLCKNHLAPIRKRGVEDELHDVEVYVVKRGLRSALCPLLDDLMTNRLLREIRSDVAELSRIYLKLGIFIDFYFKTVNCDASIKSFPDMLNFVYALKGKGPYAEAYARMIEGHHVSSYDGRLRSYTVQELAKQYWTVLKTNLTTHAYSRLVRYFKVKRSDRRLYDAFFEKRYTSDEDELNAVCRVINVDSPWYTTIPEWLRIQEAMIKRGDASFIIFPQPSHGLKHVTYTSRGWHELLRRVDPTSTPSDWTKITDHRQELWAPYLDSKTIDMKKFGCTVQTDGCSVSISMSRRMITTKKEKLKKFKASYDRTVAVDPGSRVPIAACDDRYGFKRITKKWIRSHTLEWKRDRVRKKLLEKSETDERLDRERIQKELEVVLTPKSSSGAAHYATFRLKWFEARQKPFETHSKLTRLKLDKYINVTRTNERIVREVFLRYTPSDRVLVLYGAGSKFMNRATFSGRKFRHDDLLKKLRAKRNITVETVNEAYTSKACSACNARDGSFHCLKIDHRLRRGVCPDCNGAPLDRDYNAARNILINHTRSTFCRPSFTKYGGA

SEQ ID NO: 4388 - protein, 262 aa, Xestia xanthographa
MTRYLSIEHLQHAGVHLPRVLAMFFSLCLSHAHLRSDLMKTVVVPIVKDKTGDTSDLSNYRPISLATVIAKVLLPEPVEVLQPAASQFTEQTVQQQQLLCIQDVNQTLQQFWSTESVPQCFSEKGSEHDLCEDEYFGKAPDTLVVYGAGFDFMNKGTFKGHRKFRHNELLKIAKQRKNSSVFVINEAFTTKNCSYCYESGAKNTLRASKSPHRYVYCSVCRKGIHRDKNGAKTILLKYEYTKSPVGLSSSGTDMNLVDGGSS

SEQ ID NO: 4389 - protein, 602 aa, Xestia xanthographa
MVCPSCGKNDHQRSSSAKCLNRKRRQRETGLSDDQEVSVYCVKKGLTSVLCPLSDRKDALLKTIRDDVRELSRLTIELSYLINYFYKRYSDRDDFLKMFPKLNALQFTYVLKGAKHKIPDPDNVIAEYLSARGGVKLYDGYLRSFNIMQIANQYSTILETNITIHAFKRLKRYMYHKFGDELDKSDVHASTYDAFYNNTRRPNQIGRWFDEKLTAVEIKKNFWNHIPLFIKIQQELNEHSKASFNVFPLYSHGLKYISYDSRCFHELLRRVDPIDTPSAWTKYSGNSALYWRRHFTLPSKFGYNFSTDGVCIALSMNRIVVKGAKFKSKRVKKEESSHENTLAGTGKNYSKIISVDPGAKTPIVTCTRTDDGSFMYKILKKERVVYESKEHHRTRKRLRYIKVVEGRIRLDREATELETGIALTPKSCNVQAYTRFQLKWFDEKQRVYEQRRLQRLKFDKFINDQKMLNKLVDEYFGKAPDTLVVYGAGFDFMNKGTFKGHRKFRHNEVLKIARQRKNLSVFVINEAFTTKNCSYCYESGAKNTLRVSKSPHRYVYCSVCRKGIHRDKNGAKNILLNYEYTKSPVGLSSSGTDMNLVDGGSS

SEQ ID NO: 4390 - protein, 285 aa, Xestia xanthographa
MNRIVVKGAKFKSKRVKKEESSHENTLAGTGKNYSKIISVDPGAKTPIVTCTRTDDGSFMYKILKKEHVVYESKEHHRTRKRLRYIKVVEDRIRLDREATELETGIALTPKSCNVQAYFQLKWFDEKQRVYEQRRLQRLKFDKFINDKKMLNKLVDEYFGKAPDTLVVYGAGFDFMNKGTFKGHRKFRHNEVLKIARQRKNLSVFVINEAFTTKNCSYCYESGAKNTLRVSKSPHRYVYCSVCRKGIHRDKNGAKNILLKYEYTKSPVGLSSSGTDMNLVDGGSS

SEQ ID NO: 4391 - protein, 446 aa, Xestia xanthographa
MVCPSCGKNDHQRSSSAKCLNRKRRQRETGLSDDQEVSVYCVKKGLTLVLCPLSDRKDALLTTIRDDVRELSRLTIELSYLINYSYKRYSDRDDFLKMFPKLDALQFTYVLKGAKHKISDPDNIQQELNEHSKTSFNVSPLYSHGLKYSSYDSRCFHELLRRVDPINTPSAWTKFSENSALYWRRHFTLPSKFGYNFSTDGVCIALSMNRIVVMGAKFKSKRVKKEESSHENTLAGTGKNYSKIISVDPGAKTPIVTCTRTDDGSFMSKILKKERVVYESKKHHRTRKRLRYIKDVEDRIRLDREATELETGIALTPKSCNVQAYTRFQLKWFDEKQRVYEQRRLQRLKFDKFINDQKMLNKLVDEYFGKAPDILVVYGAGFHFMNKGTFKGHRKFRHNELLKIAKQRKNLSVFVINEAFTTKKCSYCYESGAKNTLRVSTPLRIL

SEQ ID NO: 4392 - protein, 244 aa, Noctua fimbriata
MKKFGCSPQTDGISVSLSMNRIKKNSNPIKRSKKTYDRVIAVDPGSRIPVAAVESKRLQFRRITKKYVRSHTLERKRERIRNKLCRVSEEAEQKAREKLTFPVSSKNTSHVVEYTLSRMTWFDVRQEPYEKHAKLTRLGLDKYLRTAKCEEKIIKEVFDGDGVESTLVLYGAGKLVRELEDQQEDEAIDEVSTGIDEEDPPLINNDEQSPLPGTSSELQAFSMNTRNLVWKSNHLFIMSSDRNR

SEQ ID NO: 4393 - protein, 419 aa, Mamestra brassicae
MPDAYRVMFGDRKYDDRLRSFVVQEMAKQYETVLHTNISTHAYARLARYFNVKRNDPALYAAFFKKDLPEDNEKMRRVCTIINVDTVGGAKWWSTIHEWLKIQAKLEDFKLFPQPSHGLKHLTYTSRGWHELLRRVDPKSITSYWTRIVDHRRELWSPWLDVDMKKFGCSLQTDGISVSLSMNRIKKKTNPIKRPKKTYDRVIAVDPGSRIPVAAVESKRLQFRRITKKYVRSHTLEWKRERIRNKLCRVSEEAEQKARENLTFPVSSKNTIHVVEYTVFRMTWFDVRQEPYEKHAKLTRLGLDKYLRTAKCEEKIIKEVFDGGGVESTLVLYGAGSKFMNTASFSGRKFKHTLIKRLRCKRNIDVEVVDEKYTSQACSSCNAKTGEFQKIVMNHRLRWGFAETATASLIETLTLQKTY

SEQ ID NO: 4394 - protein, 217 aa, Mamestra brassicae
MAFKHPVTLFADDSTITILPIKEIYIVRDLSGVYIELGIWINYYMKTAPELPKKPDILFFDARQEPYELHCKLTRLNLDKYLYLRTAKCEERIVKDVYDSGGVEQILVLYGAGSTFMNTATFSRRKFKHDSLILKLKTKRNISVEIVDESYTSQACSSCNQKIDMNNKLRWRVCPTCHSEFDRNANAAKNILINYTRSAICRPGCSSNGDIVSSEEK

SEQ ID NO: 4395 - protein, 505 aa, Cosmia trapezina
MRRVLLPIADVSERIWRLEQHLYPLLLFRPEDGTYMDMFSAKCANRKRRIRETDLSANQEVSVYTVKKGLTSIVCPLGSKRDLLLKTICSDIKELSRLSIELSYLINHFYKRYASREDFYTLFPKFDALQFTYVLKGVKHKLNDPENVLDEYLSYRVSKRFYDCKLRSFNVMQIAIQYSTTLETNISMHAFKRLKRYMHLKYRDKLDKSEIHSSTYEAYYNKVHRSNEIGEWFTVNKIDSGDVKQNFWKHIRLFINIQEELNQINQKSFSVFPIYSHGLLHIAYDTRCVHELLRRVDPANTPSAWSKFSKDPKSYWARHFVIPPKFGYSFATDGKMLQKLVDEFFGNEPDTLVVYGAGFDFMKKGTFKGHRKFRHNDVLKIIRQRKNLSVFIINEAFTTKNCSKCYESVLKNHLHVSKSPHRYVYCSICRKGIHRDKNGAKNILLKYEYTQSPNSLSSIGTDMDRADGGSSNGTRPAPAARPPAPPERSVWLIWLQERVDYGEPW

SEQ ID NO: 4396 - protein, 286 aa, Cosmia trapezina
MNRIVSKGSKFKSKRVKKNEATIENSNVHSKSYSKIISVDPGAKTPIVTCTRSNDGGFEYRVLKKERVLYESKEHHREKKRSRFIKDIEERVKVDREDTERETGVIITLKATDVCDYTRFQLKWFDEKQRVYEQRRLQRLMFDKYINDQKMLHKLVDEFFGKEPDTLVVYGAGFDFMNKGTFKGHRKFRHNDVLKIIRQRKNLSVFIINEAFTTKNCSKCYESVLKNHLHVSKSPHRYVYCSVCRKGIHRDKNGAKNILLKYEYTKSPNSLSSIGTDMDRADGGSS

SEQ ID NO: 4397 - protein, 457 aa, Cosmia trapezina
MHRSYEIGEWFTVNKIDSGDVKQNFWKHIRLFINIQEELNQINQKSFSVFPIYSHGLLHITYDTRCVHELLRRVDPANTPSAWSEFSEDPKSYWARHFVIPPKFGYSFATDGVSVSMSMNRIVSKGSKFKSKRVKKNEATIENSNVHSKSYSKIISVDPGAKTPIVTCTRSNDGGFEYRVLKKERVLYESKEHHREKKRSRFIKDIEERVKFDREDTERETGVIITLKSTDVCDYTRFQLKWFDEKQRVYEQRRLQRLMFDKYINDQKMLHKLVDEFFGKEPDTLVVYGAGFDFMNKGTFKGHRKFRHNDVLKIIRQRKNLSVFIINEAFTTKNCSKCYESVLKNHLHVSKSPHRYVYCSVCRKGIHRDKNGAKNILLKFHISTVCFLLYIQSRRIVFRLSVLIWIVRTVEVRKVHYRNSVFVVATNKGLMREPKQWRQRFYDCLKKCLAIYLIRKI

SEQ ID NO: 4398 - protein, 753 aa, Cosmia trapezina
MHAFKRLKRYMHLKYGDKLDKSEIHSSTYEAYYNKVHRSNEIGEWFTVNKIDSGDVKQNFWKHIRLFINIQEELNQINQKSFSVFPIYAHGLLHITYDTRCVHELLRRVDPANTPSAWSKFSEDPKSYWARHFVIPPKFGYSFTTDGVSVSMSMNRIVSKGSKFKSKRVKKNEATIENSNVHSKSYSKIISVDHGAKTPIVTCTRSNDGGFEYRVLKKERVLYESKEHHREKKRSRFIKDIEECVKVDREDTERETGVIITLKSTDVCDYTRFQLKWFDEKQRVYEQRRLQRLMFDKYINDQKMLHKLVDEFFGKEPDTLVVYGAGFDFMNKGTFKGHRKFRHNDVLKIIRQRKNLSVFIITEAFTTKNCSKCYESVLKNHLHVSKSPHRYVYCSVCRKGIHRDNGAKNILLKYEYTKSPNSLSSIGTDMDRADGGSSAQVKAYGKSIATSNLLRHLKDAHGLDDSLKSQTLTIKEFFTPRTSGRTRYESSKKSDKWSLSRDLALWFARSLMPFDTVDNDAMIDFLKKYSVIVSDADLPSTYNIAREGLEDVYNSMLAYINAFISKQSPRFGAFTTDMWTDKYRRRNYITCTYHFLSEDMTLIKFTLATKEVTKKHTGETIRDEIMEVLRSFKIDQKEIYLVTDAGSNMKRAANLLGFNNHLCIGHALHNLVNVNGIENTREISKIFTKCKRHVRYRAPRVEAAASADQQQMLSSIEEFAEHLENSDSTDTESETTETPERASSSRQRLQPQR

SEQ ID NO: 4399 - protein, 468 aa, Celastrina argiolus
MWIANQYKTILETNVTVHAFKRLKRYMHHKFSEHLTKSQIHESTFNAFYKNVHGDNDAIGKWFKVNKITEKELKQNFWKFIPLFVKIQHELYENDTKSFNVFPIYKHGLKHITYDSRCLHELLRRVDKENTPTNWVQFSENDPKQYWRRCFSLPKKSFGWSMSTDGVCVSLSMNRLVRKEDKFKAKRVKREEVSNENENQMCKNYKKIIAVDPGAKTPIVTCSRSGDGDGFEYKTLKKQRVVYETREHHRERKRLKFIKDVDSKIGNDRESLEKELGFGISCKNSKVQEYTKFTLKWFDKKQKVYEQRRLQRLRFDKYINDQKTNHKIVDEYFGKEPNTLVVYGAGFDFMNKGTFKGHRKFRHNDILKIIKQRPNLSLYIINEALTTKNCSKCYESEMQQKLHVSKSPHRYVYCSKQDHNAGAAEAEHTERGAQRGPRGPLPCTVQAGDGVAAAGEDEPCGGATTDTC

SEQ ID NO: 4400 - protein, 465 aa, Celastrina argiolus
MWIANQYKTILETNVTVHAFKRLKRYMHHKFSEHLTKSQIHESTFNAFYKNVHGDNDAIGKWFKVNKITEKELKQNFWKFIPLFVKIQHDLYENDTKSFNVFPIYKHGLKHITYDSRCLHELLRRVDKENTPTNWVQFSENDPKQYWRRCFSLPKKSFGWSMSTDGVCVSLSMNRLVRKEDKFKAKRVKREEVSNENENQMCKNYKKMIAVDPGAKTPIVTCSRSGDGDGFEYKTLKKQRVVYETREHHRERKRLKFIKDVDSKIGNDRESLEKELGFGISCKNSKVQEYTKFTLKWFDEKQKVYEQRRLQRLRFDKYINDQKTNHKIVDEYFGKEPNTLVVYGAGFDFMNKGTFKGHRKFRHNDILKIIKQRPNLSLYIINEALTTKNCSKCYESEMQQKLHVSKSPHRYVYCSVCRKGIHRDKNGAKNILLKFEFKKNKTNKKSPVILSFVGTDMNVAGGGSS

SEQ ID NO: 4401 - protein, 600 aa, Cyaniris semiargus
MPCKACGKDDHSRSSSSKCSNRKRRVRETELESDEEISVYCVKRGLSSFVCPLYEKKQALLETIRSDVKDLSRLSIELSYLVNYFFKNYYNRKDFHQLFPKFDPLQFTYALKGKNHKLPDPLDIIEKYKLLNKNVTYNGTLRSFNLMWIANQYKTILETNVTVHAFRRLKRYMHHKFAEKLTKSQIHESTFNAFYKNEHGENDAIGKWFKLNKITEKEIKQNFWKYIPLFVKIQHELYENDTKSFNVFPVYKHGLKHITYDSRCLHELLRRVDKENTPSTWVQFSENDPKQYWRRYFSVPKKSFGWSFSTDGVCVSLSMNRLVSKEDKRKAKCVKREEILNENENQMFKNYKRVIAVDPGAKTPIVTCSRSGADSGGFEYKTLKKQRVVYETREHHRERKRLKFTKDVDSKIRNDRESMEKELGFGISCKNSKVQEYTEFQLKWFDEKQKVYEQRRVQRLRFDKYINDQKTNNKIVDEFFGKEPDTLVVYGAGFDFMNKGTFKGHRKFRHNDILKIIKRRANLSLYIINEAFTTKNCSKCYESRVQQKLRVSKSPHRYVYCSVCRKGIHRDKNGAKNILLKFEFKKKYYKVAGHSFVCRY

SEQ ID NO: 4402 - protein, 460 aa, Cyaniris semiargus
MSVPKYITLAGGDKMPRLGFGTWQASENEVEDAVTAALEAGYRHIDTAAAYENEKAIGRALNRWIGNDPDKRKELFIVTKLPPSGNNVKHVEEFFAASLANLGLEYLDLYLIHTPFGFEYVPGDLHPKNPDGSMKFDFSTDLIAVWKCVPPAAHWCTVVSSWCASEKVIVLVLVLSAKKGHLRTIDEGVHRAVGESLTQSYKRVIAVDPGAKTPIVTCSRSGADSGGFEYKTLKKQRVVYETREHHRERKRLKFTKDVDSKIRNDRESMEKELGFGISCKNSKVQEYTEFQLKWFDEKQKVYEQRRVQRLRFDKYINDQKTNNKIVDEFFGKEPDTLVVYGAGFDFMNKGTFKGHRKFRHNDILKIIKRRANLSLYIINEAFTTKNCSKCYESRVQQKLRVSKSPHRYVYCSVCRKGIHRDKNGAKNILLKFEFKKNTIKSPVILSFAGTDMNVAGGGSS

SEQ ID NO: 4403 - protein, 610 aa, Cyaniris semiargus
MPCKACGKDDHSRSSSSKCSNRKRRVRETELESDEEISVYCVKRGLSSFVCPLYEKKQALLETIRSDVKDLSRLSIELSYLVNYFFKNYYNRKDFHQLFPKFDPLQFTYALKGKNHKLPDPLDIIEKYKLLNKNVTYNGTLRSFNLMWIANQYKTILETNVTVHTFRRLKRYMHHKFAEKLTKSQIHESTFNAFYKNEHGENDAIGKWFKLNKITEKEIKQNFWKYIPLFVKIQHELYENDTKSFNVFPVYKHGLKHITYDSRCLHELLRRVDKENTPSTWVQFSENDPKQYWRRYFSVPKKSFGWSFSTDGVCVSLSMNRLVSKEDKRKAKCVKREEILNENENQMFKNYKRVIAVDPGAKTPIVTCSRSGADSGGFEYKTLKKQRVVYETREHHRERKRLKFTKDVDSKIRNDRESMEKELGFGISCKNSKVQEYTEFQLKWFDEKQKVYEQRRVQRLRFDKYINDQKTNNKIVDEFFGKEPDTLVVYGAGFDFMNKGTFKGHRKFRHNDILKIIKRRANLSLYIINEAFTMKNCSKCYESRVQQKLRVSKSPHRYVYCSVCRKGIHRDKNGAKNILLKFEFKKNTIKSPVILSFAGTDMNVAGGGSS

SEQ ID NO: 4404 - protein, 610 aa, Cyaniris semiargus
MPCKACGKDDHSRSSSSKCSNRKRRVRETELESDEEISVYCVKRGLSSFVCPLYEKKQALLETIRSDVKDLSRLSIELSYLVNYFFKNYYNRKDFHQLFPKFDPLQFTYALKGKNHKLPDPLDIIEKYKLLNKNVTYNGTLRSFNLMWIANQYKTILETNVTVHAFRRLKRYMHHKFAEKLTKSQIHESTFNAFYKNEHGENDAIGKWFKLNKITEKEIKQNFWKYIPLFVKIQHELYENDTKSFNVFPVYKHGLKHITYDSRCLHELLRRVDKENTPSTWVQFSENDPKQYWRRYFSVPKKSFGWSFSTDGVCVSLSMNRLVSKEDKRKAKCVKREEILNENENQMFKNYKRVIAVDPGAKTPIVTCSRSGADSGGFEYKTLKKQRVVYETREHHRERKRLKFTKDVDSKIRNDRESMEKELGFGISCKNSKVQEYTEFQLKWFDEKQKVYEQRRVQRLRFDKYINDQKTNNKIVDEFFGKEPDTLVVYGAGFDFMNKGTFKGHRKFRHNDILKIIKRRANLSLYIINEAFTTKNCSKCYESRVQQKLRVSKSPHRYVYCSVCRKGIHRDKNGAKNILLKFEFKKNTIKSPVILSFAGTDMNVAGGGSS

SEQ ID NO: 4405 - protein, 535 aa, Cyaniris semiargus
MPCKACGKDDHSRSSSSKCSNRKRRVRETELESDEEISVYCVKRGLSSFVCPLYEKKQALLETIRSDVKDLSRLSIELSYLVNYFFKNYYNRKDFHQLFPKFDPLQFTYALKGKNHKLPDPLDIIEKYKLLNKNVTYNGTLRSFNLMWIANQYKTILETNVTVHAFRRLKRYMHHKFAEKLTKSQIHESTFNAFYKNEHGENDAIGKWFKLNKITEKEIKQNFWKYIPLFVKIQHELYENDTKSFNVFPVYKHGLKHITYDSRCLHELLRRVDKENTPSTWVQFSENDPKQYWRRYFSVPKKSFGWSFSTDGVCVSLSMNRLVSKEDKRKAKCVKREEILNENENQMFKNYKRVIAVDPGAKTPIVTCSRSGADSGGFEYKTLKKQRVVYETREHHRERKRLKFTKDVDSKIRNDRESMEKKLGFGISCKNSKVQEYTEFQLKWFDEKQKVYEQRRVQRLRFDKYINDQKTNNKIVDEFFGKEPDTLVVYGAGFDFMNKGTFKGHRKFRHNDILKIIKRRAKGTVHFRPSVNTML

SEQ ID NO: 4406 - protein, 474 aa, Cyaniris semiargus
MPCKACGKDDHSRSSSSKCSNRKRRVRETELESDEEISVYCVKRGLSSFVCPLYEKKQALLETIRSDVKDLSRLSIELSYLVNYFFKNYYNRKDFHQLFPKFDPLQFTYALKGKNHKLPDPLDIIEKCLHELLRRVDKENTPSTWVQFSENDPKQYWRRYFSVPKKSFGWSFSTDGVCVSLSMNRLVSKEDKRKAKCVKREEILNENENQMFKNYKRVIAVDPGAKTPIVTCSRSGADSGGFEYKTLKKQRVVYETREHHRERKRLKFTKDVDSKIRNDRESMEKELGFGISCKNSKVQEYTEFQLKWFDEKQKVYEQRRVQRLRFDKYINDQKTNNKIVDEFFGKEPDTLVVYGAGFDFMNKGTFKGHRKFRHNDILKIIKRRANLSLYIINEAFTTKNCSKCYESRVQQKMRVSKSPHRYVYCSVCRKGIHRDKNGAKNILLKFEFKKNTIKSPVILSFAGTDMNVAGGGSS

SEQ ID NO: 4407 - protein, 255 aa, Amphipyra tragopoginis
MKGKGPYASVYRTYFGNRSYDGKLHSFVIQELAKQYETVLYTNVSTHAYARIIAVDPGSRIPLATIESKLGTFVRITKKRVCSHTLEWKRVRIRKKITGPVEAAERADRKPLPFPVSSKNTSHVIEYTVFRMNWFEARQAPYEQHAKLKRLKLDKYIAQAKSEHRIIKEVFDGGGVEKKLVLYGAGNRFMNAASFSGRKFKHAARRNKETAKLAHFDRRRGVNMTGMQRQDWGVCQDRHESSTTLGGLPKLPQRV

SEQ ID NO: 4408 - protein, 288 aa, Amphipyra tragopoginis
MSMNRIVSKGSKFKSKRVKKDEAAIENSNVHSKSYSKIISVDPGAKTPIVTCTRSDDDGFEYRVLKKERVVYESKEQHREKKRSRFIKDIEERVKVDREDTEHETGVSITLKSTDVCDYTRFQLKWFDEKQRVYEQRRLQRLKFDQYINDHKMLHKLVDEFFGKEPDTLVVYGAGFNFMNTGTFKGHRKFRHNDVLKIIRQRKNLSVFIINEAFTTKNCSKCYESGLKNHLHVSKSPHRYVYCSVCRKGIHRDKNGAKNILLKYEYTKSPNSLSSIGTDVDHADGGSS

SEQ ID NO: 4409 - protein, 284 aa, Amphipyra tragopoginis
MSSTKPSASLAEETIISKDLQQNVKIIYRPFERELSSTDNIEVYVVKRGLHSILCPLLSSEEKTKLLSEIRRDVCDLSRVYIELGVWLNLYMKTAPVLPSKLDILNFIYAMKGKGPYASAYRTYFGNRSYDGKLRSFVIQELAKQYETVLYTNVSTHAYARQAPYEQHAKLTRLKLEKYLAQAKSEHHIIKEVFGGGGVEMKLVLYGTGSRFMNAASFSGRKFKHDSLLAKMRRRPNLHVLIVDEAYTSQACSTCNDKTGETNCQDLHESSTTLGGLPKLPQRV

SEQ ID NO: 4410 - protein, 296 aa, Lysandra coridon
MNRLVSKDDKILCKAKRVKREETLNENENQMYKNYKKIIAVDPGAKTPIVTCSRRSGDGGGGGFEYKTLKKQRVVYETREHHRERKRSKFIKDVYSKIRNDRESTEKELGFGISCKNSKVQEYTEFQLKWFDEKQKVYEQRRLQRLRFDKYINDQKTNHKIVDDYFGKEPDTLVVYGAGFDFMNKGTFKGHRKFRHNDILKIIKRRPNLSLYIINEAFTTKNCSKCYESGVQQKLQVSKSPHRYVYCSVCRKGIHRDKNGAKNILLKFEFKKNTIKSPVILSFAGTDMNVAGGGSS

SEQ ID NO: 4411 - protein, 614 aa, Lysandra coridon
MPCKACGKDDHSRSSSSKCLNRKRRVRKTELEPDKEISVYCIKKGLGSFVCPLYERRQRLLETIRSDVRELSRLSIELSYLVNYFFKNYYNHKDFHLLFPKFDPLQFTYALKGKNHKLPDPLDIIEKYKLLNKTVIYNGTLRSFNLMWIANQYKTILETNVTAHAFRRLKKYMYHKFAEKLTKSQIHESTFNAFYKNVHGDNDEIGNWFKSNKITEKELKQNFWKYIPLFVKIQHELYENDTKSFNVFPIYKHGLKHISYDSRCLHELLRRVDKENTPSTWVQFSENDPKQYWKRYFSVPKKSFGWSFSTDGVCVSLSMNRLVSKDDKILCKAKRVKREDTLNENENQMYKNYKKIIAVDPGAKTPIVTCSRRSGDGGGDGFEYKTLKKQRVVYETREHHRERKRSKFIKDIDSKIRNDRESTEKELGFGISCKNSKVQEYTEFQLKWFDEKQKVYEQRRLQRLRFDKYINDQKTNHKIVDDYFGKEPDTLVVYGAGFDFMNKGTFKGHRKFRHNDILKIIKRRPNLSLYIINEAFTTKNCSKCYESGVQQKLQVSKSPHRYVYCSVCRKGIHRDKNGAKNILLKFEFKKNTIKSPVILSFAGTDMNVAGGGSS

SEQ ID NO: 4412 - protein, 586 aa, Lysandra coridon
MPCKACGKDDHSRSSSSKCLNRKRRVRETELEPDKEISVYCIKKGLGSFVCPLYERRQRLLETIRLDVRELSRLSIELSYLVNYFFKNYYNHKDFHLLFPKFDPLQFTYALKGKNHKLPDPLDIIEKYKLLNKTVTYNGTLRSFNLMWIANQYKTILETNVTVHAFRRLKKYMHHKFAEKLTKSQIHESTFNAFYKNVHGDNDEIGNSFKSNKITEKELKQNFWKYIPLFVKIQHELYENDTKSFNVFPIYKHGLKHISCDSRCLHELLRRVDKENTPSTWVQFSENDPKQYWKRYFSVPKKSFGWSFSTDGVCVSLSMNRLVSKDDKILFDPGAKTPIVTCSRRSGDGGGGGFEYKTLKKQRVVYETREHHRERKRSKFIKDVDSKIRNDRESTEKELGFGISCKNSKVQEYTEFQLKWFDEKQKVCEQRRLQRLRFDKYINDQKTNHKIVDDYFGKELDTLVVYGAGFDFMNKGTFKGHSKFRHNDILKIIKRRPNLSLYIINEAFTTKNCSKCYESGVQQKLQVSKSPHRYVYCSVCRKGIHGDKNGAKNILLKFEFKKNTIKSPVILSFAGTDMNVAGGGSS

SEQ ID NO: 4413 - protein, 380 aa, Lycaena phlaeas
MVKVGNIKKLKMFTEDLDAELGTGRKGKLELYENDSKSFNVFPIYKHGLKHITYDSRCLQELLRRVDKENTPFTWVQFSENDPTQYWRQYFSISKKSFGWSFSTDGVCVSLSMNRVISKEDKHKIDLGAKTPIVTCKRNSNNFEFKTLKKQRVVYETKEHHRQRKRLKLIKDIDLKIRNDRESLERETGGVGISCKNSKVQEYAKFQLKWFDEKQKVYEQRRLQRFRFDKYMHDQKTNHKTVDEFFAQLRLPISEMRERSRRSTPTSRDRQLSCWSLTGSRECFRLTARKIGAKASSCGNQPDLKYQVCSHPSTTIGKAAAKNKASKIRMARQRTGGGQSDDISLSVIEQRIVSLMGGDGFTSGDRVLEINPHHVGWRTQ

SEQ ID NO: 4414 - protein, 614 aa, Lysandra bellargus
MPCKACGKDDHSRSSSSKCLNRKRRVRKTELEPDKEISVYCIKKGLGSFVCPLYERRQRLLETIRSDVRELSRLSIELSYLVNYFFKNYYNHKDFHLLFPKFDPLQFTYALKGKNHKLPDPLDIIEKYKLLNKTVIYNGTLRSFNLMWIANQYKTILETNVTAHAFRRLKKYMYHKFAEKLTKSQIHESTFNAFYKNVHGDNDEIGNWFKSNKITEKELKQNFWKYIPLFVKIQHELYENDTKSFNVFPIYKHGLKHISYDSRCLHELLRRVDKENTPSTWVQFSENDPKQYWKRYFSVPKKSFGWSFSTDGVCVSLSMNRLVSKDDKILCKAKRVKREDTLNENENQMYKNYKKNIAVDPGAKTPIVTCSRRSGDGGGDGFEYKTLKKQRVVYETREHHRERKRSKFIKDIDSKIRNDRESTEKELGFGISCKNSKVQEYTEFQLKWFDEKQKVYEQRRLQRLRFDKYINDQKTNHKIVDDYFGKEPDTLVVYGAGFDFMNKGTFKGHRKFRHNDILKIIKRRPNLSLYIINEAFTTKNCSKCYESGVQQKLQVSKSPHRYVYCSVCRKGIHRDKNGAKNILLKFEFKKNTIKSPVILSFAGTDMNVAGGGSS

SEQ ID NO: 4415 - protein, 611 aa, Lysandra bellargus
MPCKACGKDDHSRSSSSKCLNRKRRVRKTELEPDKEISVYCIKKGLGSFVCPLYERRQRLLETIRSDVRELSRLSIELVNYFFKNYYNHKDFHLLFPKFDPLQFTYALKGKNHKLPDPLDIIEKYKLLNKTVIYNGTLRSFNLMWIANQYKTILETNVTAHAFRRLKKYMYHKFAEKLTKSQIHESTFNAFYKNVHGDNDEIGNWFKSNKITEKELKQNFWKYIPLFVKIQHELYENDTKSFNVFPIYKHGLKHISYDSRCLHELLRRVDKENTPSTWVQFSENDPKQYWKRYFSVPKKSFGWSFSTDGVCVSLSMNRLVSKDDKILCKAKRVKREDTLNENENQMYKNYKKNIAVDPGAKTPIVTCSRRSGDGGGDGFEYKTLKKQRVVYETREHHRERKRSKFIKDIDSKIRNDRESTEKELGFGISCKNSKVQEYTEFQLKWFDEKQKVYEQRRLQRLRFDKYINDQKTNHKIVDDYFGKEPDTLVVYGAGFDFMNKGTFKGHRKFRHNDILKIIKRRPNLSLYIINEAFTTKNCSKCYESGVQQKLQVSKSPHRYVYCSVCRKGIHRDKNGAKNILLKFEFKKNTIKSPVILSFAGTDMNVAGGGSS

SEQ ID NO: 4416 - protein, 614 aa, Lysandra bellargus
MPCKACGKDDHSRSSISKCLNRKRRVRKTELEPDKEISVYCIKKGLGSFVCPLYERRQRLLETIRSDVRELSRLSIELSYLVNYFFKNYYNHKDFHLLFPKFDPLQFTYALKGKNHKLPDPLDIIEKYKLLNKTVIYNGTLRSFNLMWIANQYKTILETNVTAHAFRRLKKYMYHKFAEKLTKSQIHESTFNAFYKNVHGDNDEIGNWFKSNKITEKELKQNFWKYIPLFVKIQDELYENDTKSFNVFPIYKHGLKHISYDSRCLHELLRRVDKENTTSTWVQFSENDPKQYWKRYFSVPKKSFGWSFSTDGVCVSLSMNRLVSKDDKILCKAKRVKREDTLNENENQMYKNYKKIIAVDPGAKTPIVTCSRRSGDGGGDGFEYKTLKKQRVVYETREHHRERKRSKFIKDIDSKIRNDRESTEKELGFGISCKNSKVQEYTEFQLKWFDEKQKVYEQRRLQRLRLDKYINDQKTNHKIVDDYFGKEPDTLVVYGAGFDFMNKGTFKGHRKFRHNDILKIIKRRPNLSLYIINEAFTTKNCSKCYESGVQQKLQVSKSPHRYVYCSVCRKGIHRDKNGAKNILLKFEFKKNTIKSPVILSFAGTDMNVAGGGSS

SEQ ID NO: 4417 - protein, 266 aa, Lysandra bellargus
MYKNYKKIIAVDPGAKTPIVTCSRRSGDGGGDGFEYKTLKKQRVVYETHEHHRERKRSKFIKDIDSKIRNDRESTEKELGFGISCKNSKVQEYTEFQLKWFDEKQKVYEQRRLQRLRFDKYINDQKTNHKIVDDYFGKEPDTLVVYGAGFDFMNKGTFKGHRKFRHNDILKIIKRRPNLSLYIINEAFTTKNCSKCYESGVQQKLQVSKSPHRYVYCSVCRKGIHRDKNGAKNILLKFEFKKNTIKSPVILSFAGTDMNVAGGGSS

SEQ ID NO: 4418 - protein, 614 aa, Lysandra bellargus
MPCKACGKDDHSRSSSSKCLNRKRRVRKTELEPDKEISVYCIKKGLGSFVCPLYERRQRLLETIRSDVRELSRLSIELSYLVNYFFKNYYNHKDFHLLFPKFDPLQFTYALKGKNHKLPDPLDIIEKYKLLNKTVIYNGTLRSFNLMWIANQYKTILETNVTAHAFRRLKKYMYHKFAEKLTKSQIHESTFNAFYKNVHGDNDEIGNWFKSNKITEKELKQNFWKYIPLFVKIQHELYENDTKSFNVFPIYKHGLKHISYDSRCLHELLRRVDKENTPSTWVQFSENDPKQYWKRYFSVPKKSFGWSFSTDGVCVSLSMSRLVSKDDKILCKAKRVKREDTLNENENQMYKNYKKIIAVDPGAKTPIVTCSRRSGDGGGDGFEYKTLKKQRVVYETREHHRERKRSKFIKDIDSKIRNDRESTEKELGFGISCKNSKVQEYTEFQLKWFDEKQKVYEQRRLQRLRFDKYINDQKTNHKIVDDYFGKEPDTLVVYGAGFDFMNKGTFKGHRKFRHNDILKIIKRRPNLSLYIINEAFTTKNCSKCYESGVQQKLQVSKSPHRYVYCSVCRKGIHRDKNGAKNILLKFEFKKNTIKSPVILSFAGPDMNVAGGGSS

SEQ ID NO: 4419 - protein, 614 aa, Lysandra bellargus
MPCKACGKDDHSRSSSSKCLNRKRRVRKTELEPDKEISVYCIKKGLGSFVCPLYERRQRLLETIRSDVRELSRLSIELSYLVNYFFKNYYNHKDFHLLFPKFDPLQFTYALKGKNHKLPDPLDIIEKYKLLNKTVIYNGTLRSFNLMWIANQYKTILETNVTAHAFRRLKKYMYNKFAEKLTKSQIHESTFNAFYKNVHGDNDEIGNWFKSNKITEKELKQNFWKYIPLFVKIQHELYENDTKSFNVFPIYKHGLKHISYDSRCLHELLRRVDKENTPSTWVQFSENDPKQYWKRYFSVPKKSFGWSFSTDGVCVSLSMNRLVSKDDKILCKAKRVKREDTLNENENQMYKNYKKIIAVDPGAKTPIVTCSRRSGDGGGDGFEYKTLKKQRVVYETREHHRERKRSKFIKDIDSKIRNDRESTEKELGFGISCKNSKVQEYTEFQLKWFDEKQKVYEQRRLQRLRFDKYINDQKTNHKIVDDYFGKEPDTLVVYGAGFDFMNKGTFKGHRKFRHNDILKIIKRRPNLSLYIINEAFTTKNCSKCYESGVQQKLQVSKSPHRYVYCSVCRKGIHRDKNGAKNILLKFEFKKNTIKSPVILSFAGTDMNVAGGGSS

SEQ ID NO: 4420 - protein, 359 aa, Atethmia centrago
MRRVCTIINVDTVGGTKWWTTIREWLKIQEKLKDFRLFPQPSHGLKHLTYTSRGWHELWRRVDPKSITCYWTRIVNHRRELWWPSLDVDMKKFGCSIQTDGISVSLSMNRIKKNSNPKKRPKKTYDRIIAVDPGSRIPVAALDSKRLQFRRITKKYVRSHTLEWKRQRIRNKLCRVSEEAEQKAREKLTFPVSSKNTSHVVEYTVFRMMWFDVRQEPYEKHAKLTRLGLDKYLRTAKCEEKIIKEVFDGGGVESTLVLYGAGSKFMNTASFSGRKFKHDSLIKRLRSKRNIDVEVVDEKYTSQACSSCNAKTGEFHKIVMNHRLRWGVCRNCNSEFDRDANAAKNILIINYFNRLTCLP

SEQ ID NO: 4421 - protein, 259 aa, Atethmia centrago
MNRIKKNSNPKKRPKKTYDRIIAVDPGSRIPVAALDSKRLQFRRITKKYVRSHTLEWKRRRIRNKLCRVSEEAEQKAREKLTFPVSSKNTSHVVEYTVFRMMWFDVRQEPYEKHAKLTRLGLDKYLRTAKCDEKIIKEVFDGGGVESTLVLYGAGSKFMNTASFSGRKFKHDSLIKRLRSKRNIDVEVVDEKYTSQACSSCNAKTGEFHKIVMNHRLRWGVCRNCNSEFDRDANAAKNILINYTRSTICRPGCSTSGAS

SEQ ID NO: 4422 - protein, 551 aa, Abrostola tripartita
MATCKTCGGSDHTRTSSKKCKNYLPPIRKRHLSESKELEIYTVKRGLASCLCPLLAPEKKLELLTEIRRDVCDLSRVYIELGVWYNYYMKTSAQLPPKPDVLNFIYAMKGKGPYSSAYASMFGARKFDDKLRSFMVQEMAKQYETVLHTNISTHAYSRLARYFNVKRNDPALFSAFFKKTLPDDNEEMRRVCSIINVDTVGGSKWWSTVPEWLKIQSKLEDFRLFPQPSHGLKHITYTSRGWHELLRRVDPKSITSIWSRIEDHRRELWAPWLDVDMKKFGCSLQTDGYSVSLSMNRIKREPNMRKRAKKSYDRIIAVDPGSRIPVAAVESRRLKFQRITKKYVRSHTLEWKRARVRNKLCRVSEEAEQKAREKLNFPVSSKNTTHVVEYTVFRMHWFNVRQEPYERHAKLTRLKLDKFIRTAKCEEKIIKEIFDDSSNTLVLYGAGSTFMNKASFSGRKFKHDSLIKRLRSKPNIDVEIVDEQYTSQACSSCNASTGEFHKIVMNHRLRWGVCPNCNSEFDRDSNAAKNILINYTRSTLCRPGCSTNGAS

SEQ ID NO: 4423 - protein, 551 aa, Abrostola tripartita
MATCKTCGGSDHTRTSSKKCKNYLPPIRKRHLSESKELEIYTVKRGLASCLCPLLAPEKKLELLTEIRRDVCDLSRVCIELGVWYNYYMKTSAQLPPKPDVLNFIYAMKGKGPYSSAYASMFGARKFDDKLRSFMVQEMAKQYETVLHTNISTHAYSRLARYFNVKRNDPALFSAFFKKTLPDDNEEMRRVCSIINVDTVGGSKWWSTVPEWLKIQSKLEDFRLFPQPSHGLKHITYTSRGWHELLRRVDPKSITSIWSRIEDHRRELWAPWLDVDMKKFGCSLQTDGYSVSLSMNRIKREPNMRKRAKKSYDRIIAVDPGSRIPVAAVESRRLKFQRITKKYVRSHTLEWKRARVRNKLCRVSEEAEQKAREKLNFPVSSKNTTHVVEYTVFRMHWFNVRQEPYERHAKLTRLKLDKFIRTAKCEEKIIKEIFDDSSNTLVLYGAGSTFMNKASFSGRKFKHDSLIKRLRSKPNIDVEIVDEQYTSQACSSCNASTGEFHKIVMNHRLRWGVCPNCNSEFDRDSNAAKNILINYTRSTLCRPGCSTNGAS

SEQ ID NO: 4424 - protein, 586 aa, Glaucopsyche alexis
MRKSLIPSESDKVPIPSSMFIVMGGGGGGCCKTCGGTDHTRRSSKKCKDYLPPIRKRKLSNGEDLEIYNVKRGLESVLCPLLEREKKQRLLSEIRRDVFDLSRVYVRLGVWINHHVKTSPAGIAKLDILNFVYAMKGKGPYAEAYRSVFGRDSYYDGKLRSFVIFELAKQYETVLHTNISTHTYARLARYFKVKRNDPTLYDAYFKKKLPNDNHHEEIRRVCSVINVDSVKSSFGWWKTLPLWLEIQETLQDFRLFPQPTHGLKHITYTSNGWHELIRRVDPPSLPSVWSKITDHIAELWSPWLSIDTRKFGCCIQTDGVSVSLSMNRRRRRSQSKVKRSKQSYDRIIAVDPGSRLPVATVESKFRHFQRVTRKYVRSHTLEWKRERTRNKLLRNVELAEQKDRETHEKPPSSKNVSRVQEYTAFRIKWFDARQEPFERHSKLTRLALDRYIRSAKCEERIIKEVFGTVENTLVLYGAGSKFMNTATFSGRKFKHDSLIKRLRSKRNITVEIVDEAYTSQACSTCNQNTGRFHKIVMNHRLRRGVCPNCRGESDRDENAARNILINYTRSTICRPGCLSAAAAATS

SEQ ID NO: 4425 - protein, 452 aa, Glaucopsyche alexis
MKGKGPYAEAYRSVFGRDSYYDGKLRLFVIFELAKQYETVLHTNISTHTYARLARYFKVKRNDPTLYDAYFKKKLPNDNHHEEIRRVCSVINVDSVKSSFGWWKTLPLWLEIQETLQDFRLFPQPTHGLKHITYTSNGWHELIRRVDPPSLPSVWSKITDHMAELWSPWLSIDTRKFGCCIQTDGVSVSLSMNRRRRRSQSKVKRSKQSYDRIIAVDPGSRLPVATVESKFGHFQRVTRKYVRSHTLEWKRERMRNKLLRDVELAEQKDRETHEKPPSSKNVSRVQEYTAFRIKWFDARQEPFERHSKLTRLALDRYIRSAKCEERIIKEVFGTVENTLVLYGAGSKFMNTATFSGRKFKHDSLIKRLRSKRNITVEIVDEAYTSQACSTCNQNTGGFHKIVMNHRLRRGVCPNCRGESDRDENAARNILINYTRSTICRPGCLSAAAAATS

SEQ ID NO: 4426 - protein, 387 aa, Glaucopsyche alexis
MYDAYFKKKLPNDNHHEEIRRVCSVINVDSVKSSFGWWKTLPLWLEIQETLQDFRLFPQPTHGLKHITYTSKGWHELIRRVDPPSLPSVWSKITDHMAELWSPWLSIDTRKFGCCIQTDGVSVSLSMNRRRRRSQSKVKRSKQSYDRIIAVDTGSRLPVATVESKFGHFQRVTRKYVRSHTLEWKRERTRNKLLRDVELAEQKDRETHEKPPSSKNVSRVQEYTAFRIKWFDARQEPFERHSKLTRLALDRYIRSAKCEERIIKEVFGTVENTLVLYGAGSKFMNTATFSGRKFKHDSLIKRLRSKRNITVEIVDEAYTSQACSTCNQNTGGFHKIVMNHRLRRGVCPNCRGESDRDENAARNILINYTRSTICRPGCLSAAAAATS

SEQ ID NO: 4427 - protein, 499 aa, Plebejus argus
MPCKACGKDDHSRSSSSKCSNRKRRVRETELEPDEEISVYCIKKGLGSFVCPLYEKRQSLLETIRSDVRELSRLSIELSYLVNYFFKNYYNHKDFHLLFPKFDPLQFTYALKCKNHKLPDPLDIIEKYKLLNKNVTYNGTLRSFNLMWIANQYKTILETNVTVHAFRRLKKYMYHKFAEKLTKSQIHESTFNAFYKNVHGDNDEIGNWFESNKITEKELKQNFWKYIPLFVRIQHELYENDTKSFNVFPIYKHGLKHISYDSRCLHELLRRVDKENTPSTWAQFSENDPKQYWRRCFSVPKKSFGWSFSTDGICVSLSMNRLVNKEDKCKAKRVKREETLNENENQMYKNYKKIIAVDPGAKTPIVTCSRSVDGDGFEYKTLKKQRVVYETREHHRERKRLKFIKDVDSKIRNDRESTEKELGFGITCKNSKVQEYTEFQLKWFDKKQKVYEQRRLQRLRFDKYINDQKTNHKIVDEFFGMEPDTLVVYGAGRPVSLRA

SEQ ID NO: 4428 - protein, 609 aa, Plebejus argus
MPCKACGKDDHSRSSSSKCSNRKRRVRETELEPDEEISVYCIKKGLGSFVCPLYEKRQSLLETIRSDVRELSRLSIELSYLVNYFFKNYYNHKDFHLLFPKFDPLQFTYALKCKNHKLPDPLDIIEKYKLLNKNVTYNGTLRSFNLMWIANQYKTILETNVTVHAFRRLKKYMYHKFAEKLTKSQIHESTFNAFYKNVHGDNDEIGNWFESNKITEKELKQNFWKYIPLFVRIQHELYENDTKSFNVFPIYKHGLKHISYDSRCLHELLRRVDKENTPSTWAQFSENDPKQYWRRCFSVPKKSFGWSFSTDGICVSLSMNRLVSKEDKCKAKRVKREETLNENENQMYKNYKKIIAVDPGAKTPIVTCSRSVDGDGFEYKTLKKQRVVYETREHHRERKRLKFIKDVDSKIRNDRESTEKELGFGITCKNSKVQEYTEFQLKWFDKKQKVYEQRRLQRLRFDKYINDQKTNHKIVDEFFGMEPDTLVVYGAGFDFMNKGTFKGHRKFRHNDILKIIKRRANLSLYIINEAFTTKNCSKCYESGVQQKLQVSKSPHRYVYCSVCRKGIHRDKNGAKNILLKFELKKKTIKSPVILSFAGTDVNVAGGGSS

SEQ ID NO: 4429 - protein, 382 aa, Plebejus argus
MWIANQYKTILETNVTVHAFKRLKRYMHHKFSEQLTKSQIHESTFNAFYKNVHSDNNEIGNWFKVNKITEKELKQNFWKYIPLFVKIQHELYENDTKSFLFPIYKHGLKHITYDSRCLYELLRRVDKENTPSNWVQFSENDPKPYWRRCFSIPKKSFGWSMSTDGVCVSLSMNRLVRKEDKLKAKRVKREEASNEHENQMYKNYKKIIAVDPGAKTPIVTCSRSGDDGGGFEYKTLKKQRVVYETREHHRQRKRLKFIKDVDLKIKNDRESLEKELGIGISCKNSNVREYTKFQLKWFDEKQKVYEQRRLQRLRFDKYINDQKTNHKIVDEYFGKEPNTLVVYGAGFDFMNKGTFKGHRKFRHNDILKIIKQRKTFILVYNQ

SEQ ID NO: 4430 - protein, 557 aa, Autographa pulchrina
MSISCKTCGGLDHTRKSSKKCKEYLPPIRKRTFDPGVELEVYTIKRGLSSIICPLLEQEKRLKLLSEIRRDVRDLSRVYIELGVWINYYLKTSPVLPSKPDVLNFLYAMKGKGPYSESYRTMFGDRKYNDKLRSFVVQEMAKQYETTIHTNIETHAYARLARYFNVKRNNPELFNAFFKKILPENHEEMTRICSLINVDTLKSKWWATIPEWLRIQEQLQDFRLFPQPSHGLKHITYTSRGWHELLRRVDPSSITSIWARIENHMQELWSLWLEVDTKRFGCCLQTDGVSVSLSMNRLINKNKTCLSLEKRKKPSYDRIIAVDPGSRLPVAAVESTRGQFKRITRKYVRSHTLEWKRERIRTKLCSTSERAEQRAREQFNFPVSSKYTSHVIEYTVFRLTWFNVRQEPYELHSKLTRLRLDKYIRTAICEERIIKEVFDAGGIEKKKILYGAGSKFMNKATFSGRKFKHDSLIRRLRSKRNIDVEIVDEQYTSQACSACNEKMGAFHKIVMNHRLRWGVCPNCRNEFDRDANAARNILINYTRSTICRPGCSTNGAS

SEQ ID NO: 4431 - protein, 557 aa, Autographa pulchrina
MSISCKTCGGLDHTRKSSKKCKEYLPPIRKRTFDPGVELEVYTIKRGLSSIICPLLEQEKRLKLLSEIRRDVRDLSRVYIELGVWINYYLKTSPVLPSKPDVLNFLYAMKGKGPYSESYRTMFGDRKYNDKLRSFVVQEMAKQYETTIHTNIETHAYARLARYFNVKRNNPELFNAFFKKILPENHEEMTRICSLINVDTLKSKWWATIPEWLCIQEQLQDFRLFPQPSHGLKHITYTSRGWHELLRRVDPSSITSIWARIENHMQELWSLWLEVDTKRFGCCLQTDGVSVSLSMNRLINKNKTCLSLEKRKKPSYDRIIAVDPGSRLPVAAVESTRGQFKRITRKYVRSHTLEWKRERIRTKLCSTSERAEQRAREQFNFPVSSKYTSHVIEYTVFRLTWFNVRQEPYELHSKLTRLRLDKYIRTAICEERIIKEVFDAGGIEKKKILYGAGSKFMNKATFSGRKFKHDSLIRRLRSKRNIDVEIVDEQYTSQACSACNEKMGAFLIIVMNHRLRWGVCPNCRNEFDRDANAARNILINYTRSTICRPGCSTNGAS

SEQ ID NO: 4432 - protein, 307 aa, Ochropleura plecta
MNELYENNKKSFNVFPIYKHGLKHITYDSRCLHELLRRVDAENTPSTWVKFSESDPKKYWRRYFSLPKNFGWSFNTDGVCVSLSMNRLIVKNDKHKAKRLNKKETLNENENQLYKKYKKIIAVDPGAKTPIVTCNRNSSNDTFEYKTLKKGRVVCETNEHRNDHREKKRLKFTKDVDLKIRNDRESLEKELGFIISCKNSNVEDYTKFQLKWLDEKQKIYEQRRLQRLKFDKYINDQKINHKIVDEYFGKERDTLVVYGAGFDFMNKGTFKGHRKFRHNDILKIIKQRKNLSLYIINEAFTTKNCSK

SEQ ID NO: 4433 - protein, 571 aa, Hemaris fuciformis
MSCKSCGGADHQRRSSKLCKNYLAPIRKRGAEDELSVVEVYAVKRGLRAALCPLLDAPTTMRLLGEIRSDVVELSRLYIRLGVFVDFYFKTVDRNASLKSFQDMMNFVYALKSKGPYAEAYSRMVEGHDVRPYDGRHRSYIIQELAKQYWTVLKTNVTTHAYSRLVRYFKVKRNDRRLFEAFFQKRYTADDDELNSVCRLINVDSPWYATIPEWLRIQDAMIGRGDASFVIFPQPSHGLKHVTYTSKGWHELLRRVSPRTIASDWKKIEDHRKELWAPYFDSKTIDMKKFGCTVQTDGRSVSLSMTRRVKNISSVATKRPKASYDRTIAVDPGSRVPIAACDDRYGFKRITKKWIRSHTLEWKRDRVRKRLLAYIETAERLDRERIEKELGVVLTPKGGTNAAHYASFRLKWFESRQKPFETYSKLTRLKFDKYVNAARTNEKIVREVFLSDAPSDRVLVLYGAGYKFMNRATFSGRKFRHDDLLKRLRARRNITVETVDEAYTSKACSACNARDGSFHRLKIDHRLRRGVCPDCNGAPLDRDYNAARNILVNHTRSTVCRPSCTVANGAA

SEQ ID NO: 4434 - protein, 571 aa, Hemaris fuciformis
MSCKSCGGADHQRRSSKLCKNYLAPIRKRGAEDELSVVEVFAVKRGLRAALCSLLDAPTTMRLLGEIRSDVVELSRLYIRLGVFVDFYFKTVDRNASLKSFQDMMNFVYALKSKGPYAEAYSRMVEGHDVRPYDGRHRSYIIQELAKQYWTVLKTNVTTHAYSRLVRYFKVKRNDRRLFEAFFQKRYTADDDELNSVCRLINVDSPWYATIPEWLRIQDAMIGRGDASFVIFPQPSHGLKHVTYTSKGWHELLRRVSPRTIASDWKKIEDHRKELWAPYFDSKTIDMKKFGCTVQTDGRSVSLSMTRRVKNISSVATKRPKASYDRTIAVDPGSRVPIAACDDRYGFKRITKKWIRSHTLEWKRDRVRKRLLAYIETAERLDRERIEKELGVVLTPKGGTNAAHYASFRLKWFESRQKPFETHSKLTRLKFDKYVNAARTNEKIVREVFLSDAPSDRVLVLYGAGYKFMNRATFSGRKFRHDDLLKRLRARRNITVETVDEAYTSKACSACNARDGSFHRLKIDHRLRRGVCPDCNGAPLDRDYNAARNILVNHTRSTVCRPSCTVANGAA

SEQ ID NO: 4435 - protein, 571 aa, Hemaris fuciformis
MSCKSCGGADHQRRSSKLCKNYLAPIRKRGAEDELSVVEVYAVKRGLRAALCPLLDAPTTMRLLGEIRSDVVELSRLYIRLGVFVDFYFKTVDRNASLKSFQDMMNFVYALKSKGPYAEAYSRMVEGHDVRPYDGRHRSYIIQELAKQYWTVLKTNVTTHAYSRLVRYFKVKRNDRRLFEAFFQKRYTADEDELNSVCRLINVDSPWYATIPEWLRIQDAMIGRGDASFVIFPQPSHGLKHVTYTSKGWHELLRRVSPRTIASDWKKIEDHRKELWAPYFDSKTIDMKKFGCTVQTDGRSVSLSMTRRVKNISSVATKRPKASYDRTIAVDPGSRVPIAACDDRYGFKRITKKWIRSHTLEWKRDRVRKRLLAYIETAERLDRERIEKELGVVLTPKGGTNAAHYASFRLKWFESRQKPFETHSKLTRLKFDKYVNAARTNEKIVREVFLSDAPSDRVLVLYGAGYKFMNRATFSGRKFRHDDLLKRLRARRNITVETVDEAYTSKACSACNARDGSFHRLKIDHRLRRGVCPDCNGAPLDRDYNAARNILVNHTRSTVCRPSCTVANGAA

SEQ ID NO: 4436 - protein, 571 aa, Hemaris fuciformis
MSCKSCGGADHQRRSSKLCKNYLAPIRKRGAEDELSVVEVYAVKRGLRAALCPLLDAPTIMRLLGEIRSDVVELSRLYIRLGVFVDFYFKTVDRNASLKSFQDMMNFVYALKSKGPYAEAYSRMVEGHDVRPYDGRHRSYIIQELAKQYWTVLKTNVTTHAYSRLVRYFKVKRNDRRLFEAFFQKRYTADEDELNSVCRLINVDSPWYATIPEWLRIQDAMIGRGDASFVIFPQPSHGLKHVTYTSKGWHELLRRVSPRTIASDWKKIEDHRKELWAPYFDSKTIDMKKFGCTVQTDGRSVSLSMTRRVKNISSVATKRPKASYDRTIAVDPGSRVPIAACDDRYGFKRITKKWIRSHTLEWKRDRVRKRLLAYIETAERLDRERIEKELGVVLTPKGGTNAAHYASFRLKWFECRQKPFETHSKLTRLKFDKYVNAARTNEKIVREVFLSDAPSDRVLVLYGAGYKFMNRATFSGRKFRHDDLLKRLRARRNITVETVDEAYTSKACSACNARDGSFHRLKIDHRLRRGVCPDCNGAPLDRDYNAARNILVNHTRSTVCRPSCTVANGAA

SEQ ID NO: 4437 - protein, 416 aa, Hemaris fuciformis
MLVKWLVRYFKVKRNDRRLFEAFFQKRYTADEDELNSVCRLINVDSPWYATIPEWLRIQDAMIGRGDASFVIFPQPSHGLKHVTYTSKGWHELLRRVSPRTIALDWKKIEDHRKELWAPYFDSKTIDMKKFGCTVQTDGRSVSLSMTRRVKNISSVATKRPKASYDRTIAVDPGSRVPIAACDDRYGFKRITKKWIRSHTLEWKRDRVRKRLLAYRETAERLDRERIEKELGVVLTPKGGTNAAHYASFRLKRFESRHKPFETHSKLTRLKFDKYVNAARTNEKIIREVFLSDAPSDRVLVLYGAGYKFMNRATFSGRKFRHDDLLKRLRARRNITVETVDEAYTSKACSACNARDGSFHRLKIDHRLRRGVCPDCNGAPLDRDYNAARNILVNHTRSTKLHRRERRSVTSAQREK

SEQ ID NO: 4438 - protein, 571 aa, Hemaris fuciformis
MSCKSCGGADHQRRSSKLCKNYLAPIRKRGAEDELSVVEVYAVKRGLRAALCPLLDAPTTMRLLGEIRSDVVELSRLYIRLGVFVDFYFKTVDRNASLKSFQDMMNFVYALKSKGPYAEAYSRMVEGHDVRPYDGRHRSYIIQELAKQYWTVLKTNVTTYAYSRLVRYFKVKRNDRRLFEAFFQKRYTADDDELNSVCRLINVDSPWYATIPEWLRIQDAMIGRGDASFVIFPQPSHGLKHVTYTSKGWHELLRRVSPRTIASDWKKIEDHRKELWAPYLDSKTIDMKKFGCTVQTDGRSVSLSMTRRVKNISSVATKRPKASYDRTIAVDPGSRVPIAACDDRYGFKRITKKWIRSHTLEWKRDRVRKRLLAYIETAERLDRERIEKELGVVLTPKGGTNAAHYASFRLKWFESRQKPFETHSKLTRLKFDKYVNAARTNEKIVREVFLSDAPSDRVLVLYGAGYKFMNRATFSGRKFRHDDLLKRLRARRNITVETVDEAYTSKACSACNARDGSFHRLKIDHRLRRGVCPDCNGAPLDRDYNAARNILVNHTRSTVCRPSCTVANGAA

SEQ ID NO: 4439 - protein, 571 aa, Hemaris fuciformis
MSCKSCGGADHQRRSSKLCKNYLAPIRKRGAEDELSVVEVYAVKRGLRAALCPLLDAPTTMRLLGEIRSDVVELSRLYIRLGVFVDFYFKTVDRNASLKSFQDMMNFVYALKSKGPYAEAYSRMVEGHDVRPYDGRHRSYIIQELTKQYWTVLKTNVTTHAYSRLVRYFKVKRNDRRLFEAFFQKRYTADEDELNSVCRLINVDSPWYATIPEWLRIQDAMIGRGDASFVIFPQPSHGLKHVTYTSKGWHELLRRVSPRTIASDWKKIEDHRKELWAPYFDSKTIDMKKFGCTVQTDGRSVSLSMTRRVKNISSVATKRPKASYDRTIAVDPGSRVPIAACDDRYGFKRITKKWIRSHTLEWKRDRVRKRLLAYIETAERLDRERIEKELGVVLTPKGGTNAAHYASFRLKWFESRQKPFETHSKLTRLKFDKYVNAARTNEKIVREVFLSDAPSDRVLVLYGAGYKFMNRATFSGRKFRHDDLLKRLRARRNITVETVDEAYTSKACSACNARDGSFHRLKIDHRLRRGVCPDCNGAPLDRDYNAARNILVNHTRSTVCRPSCTVANGAA

SEQ ID NO: 4440 - protein, 571 aa, Hemaris fuciformis
MSCKSCGGADHQRRSSKLCKNYLAPIRKRGAEDELSVVEVYAVKRGLRAALCPLLDAPTTMRLLGEIRSDVVELSRLYIRLGVFVDFYFKTVDRNASLKSFQDMMNFVYALKSKGPYAEAYSRMVEGHDVRPYDGRHRSYIIQELAKQYWTVLKTNVTTHAYSRLVRYFKVKRNDRRLFEAFFQKRYTADDDELNSVCRLINVDSPWYATIPEWLRIQDAMIGRGDASFVIFPQPSHGLKHVTYTSKGWHELLRRVSPRTIASDWKKIEDHRKELWAPYFDSKTIDMKKFGCTVQTDGRSVSLSMTRRVKNISSVATKRPKASYDRTIAVDPGSRVPIAACDDRYGFKRITKKWIRSHTLEWKRDRVRKRLLAYIETAERLDRERIEKELGVVLTPKGGTNAAHYASFRLKWFESRQKPFETHSKLTRLKFDKYVNAARTNEKIVREVFLSDAPSDRVLVLYGAGYKFMNRATFSGRKFRHDDLLKRLRARRNITVETVDEAYTSKACSACNARDGSFHRLKIDHRLRRGVCPDCNGAPLDRDYNAARNILVNHTRSTVCRPSCTVANGAA

SEQ ID NO: 4441 - protein, 226 aa, Hemaris fuciformis
MTRRVKKISSVATKRPKASYDRTIAVDPGSRVPISACDDRYGFKRITKKWIRSHTLKWKRDRVRKRLLAYSETAERLDRERIEKELGVVLTPKGGTNAAHYASFRLKWFESRQKPFETHSKLTRLKLDKYVNAARTNEKIVRAVFLSDAPSDRVLVLYGAGSKFTNRVTFSGRKFRHDDLLKWLRARRNITVETVDEAYTSKACSACNARDGSFHRLKIDHKLRRG

SEQ ID NO: 4442 - protein, 571 aa, Hemaris fuciformis
MSCKSCGGADHQRRSSKLCKNYLAPIRKRGAEDELSVVEVYAVKRGLRAALCPLLDAPTTMRLLGEIRSDVVELSRLYIRLGVFVDFYFKTVDRNASLKSFQDMMNFVYALKSKGPYAEAYSRMVEGHDVRPYDGRHRSYIIQELAKQYWIVLKTNVTTHAYSRLVRYFKVKRNDRRLFEAFFQKRYTADEDELNSVCRLINVDSPWYATIPEWLRIQDAMIGRGDASFVIFPQPSHGLKHVTYTSKGWHELLRRVSPRTIASDWKKIEDHRKELWAPYFDSKTIDMKKFGCTVQTDGRSVSLSMTRRVKNISSVATKRPKASYDRTIAVDPGSRVPIAACDDRYGLKRITKKWIRSHTLEWKRDRVRKRLLAYIETAERLDRERIEKELGVVLTPKGGTNAAHYASFRLKWFESRQKPFETHSKLTRLKFDKYVNAARTNEKIVREVFLSDAPSDRVLVLYGAGYKFMNRATFSGRKFRHDDLLKRLRARRNITVETVDEAYTSKACSACNARDGSFHRLKIDHRLRRGVCPDCNGAPLDRDYNAARNILVNHTRSTVCRPSCTVANGAA

SEQ ID NO: 4443 - protein, 398 aa, Idaea aversata
MQIAKTYSTILETNVQTHAFKRLKKYMYHKFGTDIDKSEVHTSTYDAFYNGTCKSNNGICEWFTENKITAKELKINFWKFVPLFLKIQQELYEHEKPSFNIFPIYSHGLKFITYDSSCIHELLRRADPNNTPSTWSVFSENTTMYWNRHFTLPNKFGYSFSTDGVSVCLSMNRIVRKDQKFNKSKKAKLFDVVDVDDTKRYSKIIAVDPGAKTPIVTCTRQYYNGDEFSYKILKKERVLYESKEYHRTRKRCRLIKDIEERIRSDREDVERETGFEVTRKSNKVDIYTRFQLKWFDEKQRIYEQRRLQRLKFDKYINDQKMLNKIVDEYFGKQPNTLVVYGSDFDFMNKGTFKGHRKFRHNEILKIIKHRKNLSVFVINEAFTTKNCSYCHDRDRARI

SEQ ID NO: 4444 - protein, 441 aa, Mythimna ferrago
MKATPELPSKPDVLNLLYAMKGKGPYAEVYRGMFGDRRYDDKLRSFVVQEMAKQYETVLHNNVNTYAYVLLAQYFKVKRNDPTLCPDFFKKTLPDNNEEMRRVCSIINVDMVKSSKWWSTIPEWLKVQAKLEDFKLFPQPSHGLKHITYTSRGWQELLRRVDPKSITSYWTRIQNHRRELWSPWLDMDVKKFGCMIQTDGVSVSLSMKRVKKEKFDVKRSKITYDHIIAVDPGSRIPVAAVESKRLCFRRITKKFVRSHTLEWKRERVRKLSFPVSSKNTSHVVEYTVFRMTWFDVRQEPYEKHSKLTRLRLDKYLRSARCEEKIVKEVFDGGGVESIRILYGAGSTFMNTASFSGRKFMNTASFSGRKFMNMASFSGRKFKHDSLIKRLRSKRNIDVEIVDESYTSQACSSCNEKTGEFHKVKMDHKLRLGGLPKLQQRV

SEQ ID NO: 4445 - protein, 336 aa, Chrysoteuchia culmella
MKTSPNLLSEKPDILKYVYAMKNKGPYAEKYREMCNGSCYDGRLRSFVIQELAKSYETVLYTNIETHGYSRLCRYFNVKRNDVRIYDAFFKKQFTENDEISDMCKLINEDILKKSCWKTIPICLKIQKELHERENSKSFNLFPQPSHGLKHVTSHTLEWKRDKERNKLLKESLEAESKDREYIAKQKGIILSAKSTLHVNEYTEFRLKWFDRRQEPYESYRKLTRLNLDKFIRTAKTEEKIIREIFDGGGDAVKVLYGAGSTFMNTANFSSRKFKHNSLLTRIRNKNTKVEVVNESYTSQACSNCNHNYNAAKNILINFTRSAICRPGYRVTNEVS

SEQ ID NO: 4446 - protein, 200 aa, Chrysoteuchia culmella
MNRYIKTKEEPPPPKRLQPSESFKKIVAVDPGSRVPLVTCDSNFQFKRITKNFIRSHTLEWKRDRVRNKLLKESLEAESKDREHIAKEKGIILSAKSTLHVNEYTEFRLKWLDRKQELYESYRKLTRLNLDKFIRTAKTEEKVIREIFDGGGDAVKVLYGAGSTFMNTANFSGRKFKHNSLLIYIRNKNTKVEVESLLKL

SEQ ID NO: 4447 - protein, 565 aa, Cydia splendana
MEKQCKSCGGTDHHRRSSAKCTNYLPPIRKRKLSDGAAQTLDIYVVKRGLCSALCPLLSPQRRSRLLEEIRRDVRDLSRIYIQLGIFYNLYMKTAPALPDIPDVLNFVYAMKGKGPYAESYTRYFGDHRRYDGKLRSFIVQELAKQYETTLRTNITMHAYSRLARYFKVKRNDERLFRAYYSRILPDGDDNTSREIARVCTVINKDTVEGSRWWKTVPEWMRIQQGMETRSFRLFPQPSHGLKHVMYTSTGWFELLRRVAPDTVPGTWNKITDHLSQLWTPWLDVPATKFGCCLQTDGVSVSLSMNRCAKPQMTEKKKKRRVEYDRVIAVDPGSRVPLATVESKRYSFKRVTRKYVRSHTLEWKRDRVRNKLIAPILAEMQKDRESLNFPVSSKNTDHVIEYSVFRMKWFEAMQVPYETHSKLTRLGLDKYIRIAKCEERIVREVFDGGGVSDVLVLYGAGSKFMNTASFSGRKFRHDSLLKRLRSKSNIRVEVVDEAYTSQACSACNQRTGAFQKIGMNHRLRWGVCPTCHSEFDRDENAAKNILLNHIRSTICRPRCLPGRAS

SEQ ID NO: 4448 - protein, 455 aa, Cydia splendana
MKGKGPYAESYTRYFGDHRRYDGKLRSFIVQELAKQYETTLRTNITMHAYSRLARYFKVKRNDERLFRAYYRRILPDGDDNTSREIARVCAVINKDTVEGSRWWKTVPEWMRIQQGMVTRSFRLFPQPSHGLKHVMYTSTGWFELLRRVAPDTVPGTWNKITDHLNQLWTPWLDVPATKFGCCLQTDGVSVSLSMSRCAKPLMTEKKKKRCVEYDRVIAVDPDSREPLATVESKRYSFKRVTSKYVRSHTLEWKRDRVRNKLIAPILAEMQKDRESLNFPVSSKNTDHVIEYTVFRMKWFEAMQVPYETHSKLTRLGLDKYIRIAKCEERIAREVFDGGGLSDVLVLYGAGSKFMNTASFSGRKFRHDSLLKRLRSKSNIRVEIVDESYTSQACSACHQRTGAFQKIGMNHRLRWGVCPTCHSEFDRDENAAKNILINHIRSTICRPRCLPERAS

SEQ ID NO: 4449 - protein, 455 aa, Cydia splendana
MKGKGPYAESYTRYFGDHRRYDGKLRSFIVQELAKQYETTLRTNITMHAYSRLARYFKVKRNDERLFRAYYSRILPDGDDNTSREIARVCAVINKDTVEGSRWWKTVPEWMRIQQGMVTRSFRLFPQPSHGLKHVMYTSTGWFELLRRVAPDTVPGTWNKITDHLNQLWRPWLDVPATKFGCCLQTDSVSVSLSMSRCAKPLMTEKKKKRCVEYDRVIAVDPGSRVPLATVESKRYSFKRVTSKYVRSHTLEWKRDRVRNKLIAPILAEMQKDRESLNFPVSSKNTDHVIEYTVIRMKWFEAMQVPYETHSKLTRLGLDKYIRIAKCEERIAREVFDGGGVSDVLVLYGAGSKFMNTASFSGRKFRHDSLLKRLRSKSNIRVEIVDESYTSQACSACNQRTGAFQKIGMNHRLRWGVCPTCHSEFDRDENAAKNILINHIRSTICRPRCLPGRAS

SEQ ID NO: 4450 - protein, 529 aa, Cydia splendana
MAQRKPWISTSSNAVCAPRCVLFSRLNADPDCSKRSDGTCVTCRASTSNYTYNLYMKTAPALPDIPDVLNFVYTMKGKGPYAESYTRYFGDHRRYDVKLRSFIVQGLAKQYETTLRTNITMHAYSRLARYFKVKRNDERLFRAYYSRILPDGDDNTSREIARVCTVINKDTVEGSRWWKTVPEWMRIQQGMETRSFRLFPQPSHGLKHVMYTSTGWFELLRRVAPDTVPGTWNKITDHLSQLWTPWLDVPATKFGCCLQTDGVSVSLSMNRCAKPQMTEKKKKRRVEYDRVIAVDPGSRVPLATVESKRYSFKRVTRKYVRSHTLEWKRDRVRNKLIAPILAEMQKDRASLNFPVSSKNTDHVIEYSVFRMKWFEAMQVPYETHSKLTRLGLDKYIRIAKCKERIVREVFDGGGVSDVLVLYGAGSKFMNTASFSGRKFRHDSLLKRLRSKSNIRVEIVDEAYTSQACSACNQRTGAFQKIGMNHRLRWGVCPTCHSEFDRDENAAKNILINHIRSTICRPRCLPGRAS

SEQ ID NO: 4451 - protein, 329 aa, Cydia splendana
MIENADYWSCRALEPLRYSRLLRRVAPDTVPGTWNEITDHLSQLWTPWLDVPATKFGCCLQTDGVSVTLSMNRCAKPQMTEKKKRRVEYDRVIAVDPGSRVPLATVESKRYSFKRVTRKYVRSHTLEWKSSVRNKLIAPILAEMQKDRESLNFPVSSKNTDHVIEYSVFRMKWFEAMQVPYETHSKLTRLGLDKYIRIAKCEERIVREVFDGGGVSDVLVLYGAGSKFMNTASFSGRKFRHDSLLKRLRSKSNIRVEIVDEAYTSQACSACNQRTGAFQKIGMNHRLRWGVCPTCHSEFDRDENAAKNILINHIRSTICRPRCLPGRAS

SEQ ID NO: 4452 - protein, 554 aa, Cydia splendana
MTDDSGSSVMEKQCKSCGGTDHHRRSSAKCTNYLPPIRKRKLSDGAAQTLDIYVVKRGLCSALCPLLSPQRRSRLLEEIRRDVRDLSRIYIQLGIFYNLYMKTAPALPDIPDVLNFVNAMKGKGPYAESYTRYFGDHRRYDGKLRSFIVQELAKQYETTLRTNITMHAYSRLARYFKVKRNDERLFRAYYSRILPDGDDNTSREIARVCTVINKDTVEGSRWWKTVPEWMRIQQGMETRRWFELLRRVAPDTVPGTWNKITDHLSQLWTPWLDVPATKFGCCLQTDGVSVSLSMNRCAKPQMTEKKKKRRVEYDRVIAVDPGSRVPLATVESKRYSFKRVTRKYVRSHTLEWKRDRVRNKLIAPILAEMQKDRESLNFPVSSKNTDHVIEYSVFRMKWFEAMQVPYETHSKLTRLGLDKYIRIAKCEERIVREVFDGGGVSDVLVLYGAGSKFMNTASFSGRKFRHDSLLKRLRSKSNIRVEIVDEAYTSQACSACNQRTGAFQKIGMNHRLRWGVCPTCHSEFDRDENAAKNILINHIRSTICRPRCLPGRAS

SEQ ID NO: 4453 - protein, 474 aa, Cydia splendana
MKTAPALPDIPDVLNFVNAMKGKGPYAESYTRYLGDHRRYDGKLRSFIVQELAKQYETTLRTNITMHAYSRLARYFKVKRNDERLFRAYYSRILPDGDDNTSREIARVCTVINKDTVEGSRWWKTVPEWMRIQQGMETRSFRLFPQPSHGLKHVMYTSTGWFELLRRVAPDTVPGTWNKITDHLSQLWTPWLDVPATKFGCCLQTDGVSVSLSMNRCAKPQMTEKKKKRRVEYDRVIAVDPGSRVPLATVESKRYSFKRVTRKYVRSHTLEWKRDRVRNKLIAPILAEMQKDRESLNFPVSSKNTDHVIEYSVFRMKWFEAMQVPYETHSKLTRLGLDKYIRIAKCEERIVREVFDGGGVSDVLVLYGAGSKFMNTASFSGRKFRHDSLLKRLRSKSNIRVEIVDEAYTSQACSACNQRTGAFQKIGMNHRLRWGVCPTCHSEFDRDENAAKNILINHIRSTICRPRCLPGRAS

SEQ ID NO: 4454 - protein, 638 aa, Cydia splendana
MEKQCKSCGGTDHHRRSSAKCTNYLPPIRKRKLSDGAAQTLDIYVVKRGLCSALCPLLSPQRRSRLLEEIRRDVRDLSRIYIQLGIFYNLYMKTAPALPDIPDVLNFVYAMKGKGPYAESYTRYFGDHRRYDGKLRSFIVQELAKQYETTLRTNITMHAYSRLARYFKVKRNDERLFRAYYSRILPDGDDNTSREIARVCTVINKDTVEGSRWWKTVPEWMRIQQGMETRSFRLFPQPSHGLKHVMYTSTGWFELLRRVAPDTVPGTWNKITDHLSQLWTPWLDVPATKFGCCLQTDGVSVSLSMNRCAKPQMTEKKKKRRVEYDRVIAVDPGSRVPLATVESKRYSFKRVTRKYVRSHTLEWKRDRVRNKLIAPILAEMQKDRESLNFPVSSKNTDHVIEYSVFRMKWFEATQVPYETHSKLTRLGLDKYIRIAKCEERIVREVFDGGGVSDVLVLYGAGSKFMNTASFSGRKFRHDSLLKRLRSKSNISVEIVDEAYTSQACSACNQRTGAFQKIGMNHRLRWGVCPTCHSEFDRDENAAKNILINHIRATDGLPDEFRLAPETFSLSRDSKKWARKEGSLDSLPGGYRDDTRPAAKMRPVDTPKQLPYEFRLAPESFSLSRGSGKPGSLIGDSRH

SEQ ID NO: 4455 - protein, 574 aa, Cydia splendana
MTDDSGSSVMEKQCKSCGGTDHHRRSSAKCTNYLPPIRKRKLSDGAAQTLDIYVVKRGLCSALCPLLSPQRRSRLLEEIRRDVRDLSRIYIQLGLFYNLYMKTAPVLPDIPDVLNFVYAMKGKGPYAESYTRYFGDHRRYDGKLRSFIVQELAKQYETTLRTNITMHAYSRLARYFKVKRNDERLFRAYYSRILPDGDDNTSREIARVCTVINKDTVEGSRWWKTVPEWMRIQQGMETRSFRLFPQPSHGLKHVMYTSTGWFELLRRVAPDTVPGTWNKITDHLSQLWTPWLDVPATKFGCCLQTDGVSVSLSKNRCAKPQMTEKKKKRRVEYDKVIAVDPGSRVPLATVESKRHSFKRVTRKYVRSHTLEWKRDRVRNKLIAPILAEMQKDRESLNFPVSSKNTDHVIEYSVFRMKWFEAMQVPYETHSKLTRLGLDKYIRIAKCEERIVREVFDGGGVSDVLVLYGAGSKFMNTASFSGRKFRHDSLLKRLRSKSNIRVEIVDEAYTSQACSACNQRTGAFQKIGMNHRLRWGVCPTCHSEFGRDENAAKNILINHIRSTICRPRCLPKKVS

SEQ ID NO: 4456 - protein, 610 aa, Apamea monoglypha
MACPSCGKDDHQRSSSAKCLNRKRRIRETGLANDQEVSVYSVKKGLTSVLCPLSDCKEAIVRTIREDVREMSRLSIELSYVVNFFYKHYSNREDFHILFPKFDALQFTYALKGAKYKLNDPDNVISTYMSLRNQNNLYDGRLRSFIIMQIAKQYSTILETNITTQHAFKRIKRYMYHKFGDSMDKSEIHSSTYDAYYNGVCKSNRIGEWFNENRINSKDVSKNFWRFVPLFLQIQHELYDQGKLSFNVFPIYSHGLKFITYDSRCIHELLRRVDSSNTPSSWTDFSENTSMYWNRHFTLPRKFGYSFSTDGVSVTLSMNRIVQKGQKFTSKKAKRSEDALQNTTVGGVRNYSKVIAVDPGAKTPIVTCTCNGGDFSYKVLKKERVVYESKECHRARKRLRFLKDIEERIKVDRESTEQEIGIELTRKSQNAEPYTRFQLKWFDEKQRMYEQRRVQRLKFDKYINDQKMLHKIVDEYFGKEPDTLVVYGAGFDFMNKGTFKGHRKFRHNDVIKIIKQRRNLSVYVINEAYTTKNCSYCHDRDRIQQKLSVSKSPHRYVHCSVCRKGIHRDKNGAKNILLKYENMKKLPISLSSVGTDMSLVDGGSSQGSLS

SEQ ID NO: 4457 - protein, 609 aa, Apamea monoglypha
MACPSCGKDDHQRSSSAKCLNRKRRIRETGLANDQEVSVYSVKKGLTSVLCPLSDCKEAIVRTIREDVREMSRLSIELSYVVNFFYKHYSNREDFHILFPKFDALQFTYALKGAKYKLNDPDNVISTYMSLRNQNNLYDGRLRSFIIMQIAKQYSTILETNITTHAFKRIKRYMYHKFGDSMDKSEVHSSTYDAYYNGVCKSNRIGEWFNENRINSKGVSKNFWRFVPLFLQIQHELYDQGKLSFNVFPIYSHELKFITYDSRCIHELLRRVDSSNTPSSWTDFSENTSMYWNRHFTLPRKFGYSFSTDGVSVTLSMNRIVQKGQKFKSKKAKRSEDALQNTTVGGVRNYSKVIAVDPGAKTPIVTCTRNGGDFSYKVLKKERVVYESKECHRARKRLRFLKDIEERIKVDRESTEQEIGIELTRKSQNAEPYTRFQLKWFDEKQRMYEQRRVQRLKFDKYINDQKMLHKIVDEYFGKEPDTLVVYGAGFDFMNKGTFKGHRKFRHNDVIKIIKQRRNLSVYVINEAYTTKNCSYCHDRDRIQQKLSVSKSPHRYVHCSVCRKGIHRDKNGAKNILLKYENMKKLPISLSSVGTDMSLVDGGSSQGSLS

SEQ ID NO: 4458 - protein, 343 aa, Pammene fasciana
METRSFRLFPQPSHGLKHVTYTSIGWYELLRRVAPDTVPGAWTKITDHLCQLWMPWLEVPAAKFGCCLQTDGVSVSLSMNRCVKSQTTKKNKKLQHVEYDRVIAVDPGSRIPLATVESKRYAFKRVTRKYVRSHTLEWKRDRIRNKLIAPILVDMQKDRELFNFPVSSKNTDHVIEYTVFRIKWFKAMQVPYETHSKLTRLGLDKYISIAKCEERIVRQVFDGGGASDVLVLYGAGCKFMNAASFSGRKFRHDSLLRRLRNKSNIQVEIVDESHTSQACSACNQRTGEFQKIGMNHRLRWGVCPTCHSEFDRDANAAKNILINHTRSTICRPRCLPRRGIVTF

SEQ ID NO: 4459 - protein, 578 aa, Pammene fasciana
MPKGSSSSVMDKKCKSCGGVDHERRSSARCANYLPPIRKRKLSDGAAQTLEVYVIKRGLCSVLCPLISPQQRSRLIEEIRRDVRDLSRIYVKLGIFYNLYMKTAPVLPDTPDVLNFVYAMKGKGPYTEPYARYFGENCHYDGKLRSYILQELAKQYETTLRTNITTHAYSRLARCLKVKRNDERLFRAYYKKVSPDGDDYTSREIARVCAIINKDTVEGKRWWNTVPEWMRIQQGMETRSFRLFPQPSHGLKHVTYTSIGWYELLRRVAPDTVPGAWTKITDHLCQLWTPWLKVPAAKFGCCLQTDGVSVSLSMNRCVKSLTTKKNKKLQHVEYDRVIAVDPGSRIPLATVESKRYAFKRVTRKYVRSHTLEWKRDRIRNKLIAPILADMQKDRESFNFPVSSKNTDHVIEYTIFRIKWFEAMQVPYESHSKLTRLGLDKYISIAKCEERIVRQVFDGGGASDVLVLYGAGCKFMNTASFSGRKFRHDSLLRRLRNKSNIQVEIVDESYTSQACSTCNQRTGEFQKIGMNHQLRWGVCPTCHSEFDRDANAAKNILINHTRSTICRPRCLPGRGIVTS

SEQ ID NO: 4460 - protein, 257 aa, Pammene fasciana
MDAHSAGDGDAQLSSVSAAIAWTQACDIHIDWMVRATAPSRSRYRPRCLDQNYRPSLSTVDAVVESASRQIRLLSSDGRLSSKNTDHVIEYTIFRIKWFEAMQVPYESHSKLTRLGLDKYISIAKCEERIVRQVFDGGGASDVLVLYGAGCKFMNTASFSGRKFRHYSLLRRLRNKSNIQVEIVDESYSSQACSTCNQRTGEFQKIGMNHQLRWGVCPTCQSEFDRDANAAKNILINHTRSTICRPRCLPGRGIVTS

SEQ ID NO: 4461 - protein, 578 aa, Pammene fasciana
MPKGSSSSVMDKKCKSCGGVDHERRSSARCANYLPPIRKRKLSDGAAQTLEVYVIKRGLCSVLCPLISPQQRSRLIEEIRRDVRDLSRIYVKLGIFYNLYMKTAPVLPDTPDVLNFVYAMKGKGPYTEPYARYFGENCHYDGKLRSYILQELAKQYETTLRTNITTHAYSRLARCLKVKRNDERLFRAYYKKVSPDRDDYTSREIARVCAIINKDTVEGKRWWNTVPEWMRIQQGMETRSFRLFPQPSHGLKHVTYTSIGWYELLRRVAPDTVPGAWTKITDHLCQLWTPWLKVPAAKFGCCLQTDGVSVSLSMNRCVKSLTTKKNKKLQHVEYDRVIAVDPGSRIPLATVESKRYAFKRVTRKYVRSHTLEWKRDRIRNKLIAPILADMQKDRESFNFPVSSKNTDHVIEYTIFRIKWFEAMQVPYESHSKLTRLGLDKYISIAKCEERIVRQVFDGGGASDVLVLYGAGCKFMNTASFSGRKFRHDSLLRRLRNKSNIQVEIVDESYTSQACSTCNQRTGEFQKIGMNHQLRWGVCPTCHSEFDRDANAAKNILINHTRSTICRPRCLPGRGIVTS

SEQ ID NO: 4462 - protein, 578 aa, Pammene fasciana
MPKGSSSSVMDKKCKSCGGVDHERRSSARCANYLPPIRKRKLSDGAAQTLEVYVIKRGLCSVLCPLISPQQRSRLIEEIRRDVRDLSRIYVKLGIFYNLYMKTAPVLPDTPDVLNFVYAMKGKGPYTEPYARYFGENCHYDGKLRSYILQELAKQYETTLRTNITTHAYSRLARCLKVKRNDERLFRAYYKKVSPDGDDYTSREIARVCAIINKDTVEGKRWWNTVPEWMRIQQGMETRSFRLFPQPSHGLKHVTYTSIGWYELLRRVAPDTVPGAWTKITDHLCQLWTPWLKVPAAKFGCCLQTDGVSVSLSMNRCVKSQTTKKNKKLQHVEYDRVIAVDPGSRIPLATVESKRYAFKRVTRKYVRSHTLEWKRDRIRNKLIAPILADMQKDRESFNFPVSSKNTDHVIEYTIFRIKWFEAMQVPYESHSKLTRLGLDKYISIAKCEERIVRQVFDGGGASDVLVLYGAGCKFMNTASFSGRKFRHDSLLRRLRNKSNIQVEIVDESYTSQACSTCNQRTGEFQKIGMNHQLRWGVCPTCHSEFDRDANAAKNILINHTRSTICRPRCLPGRGIVTS

SEQ ID NO: 4463 - protein, 370 aa, Pammene fasciana
MPIINKDTVEGKRWWNTVPEWMRIQQGMETRSFRLFPQPSHGLKHVTYTSIGWYELLRRVAPDTVPGAWTKITDHLCQLWTSWLKVPAAKFGCCLQTDGVSVSLSMNRCVKSQTTKKNKKLQHVEYDRVIAVDPGSRIPLATVESKRYAFKHVTRKYVRSHTLEWKRDRIRNKLIAPILADMQKDRESFNFPVSSKNTDHVIEYTIFRIKWFESMQVPYESHSKLTRLGLDKYISIAKCEERIVRQVFDGGGASDVLVLYGAGCKFMNTASFSGRKFRHDSLLRRLRNKSNIQVEIVDESYTSQACSTCNQRTGEFQKIGMNHQLRWGVCPTCHSEFDRDANAAKNILINHTRSTICRPRCLPGRGIVTS

SEQ ID NO: 4464 - protein, 429 aa, Dunaliella primolecta
MWDSISRGVESVIGAMRGVAQRVAARWTGNSGAPARDMAVPLGRNNPPPEQLFRQGAESRWIPEPDVMELLDAAALYPIVCEHMRGRMGRRGLAKGTASKKDLVDRLQQALPARSRRWLERQPVVELLAACAAFGVDEGIDGDTVKATLVSMARLRAKKPGDPKRPVVVGVGASKMPPAAHGVQKFSAPTQLKKALLRAMLRGVGHSKLHPRMLMSLNEYKTTVSCSRCGARTVEPMVRDFVTHLQRKSRRLRECPVCKEEYFKQQQQQVEGMAEGGGEQQQVEGMAEGGGEQQLVEGMAEEGGEQQPVEGMAEGGGEQQPVEGVSETDEEEEQEEGMSRQGSTGWAGMDLDEEEEEVGGVGEGGMGANEAEGEVHAAVPGRRRERVKKPQRSYQMHRDVNAAWNLWEVCVAQYFGHPRPRYLRADTAA

SEQ ID NO: 4465 - protein, 816 aa, Dunaliella primolecta
MANSPKPTPGMAQFDVVPPGPIHRDKKMMLAKFLQATPGFSSKPSSQWKLHPEKQRQSSKSRPPAGPPSTSAVPWVLEKDGEVVQRGVPDGPTMGTTTPSAPTISHASSYFIFSKHGSTITAFPVDDLLNFKPLPRRPGAQPQTLETAELAMRNGRNMPEQSDLRLVPKSVKEAALRNAEERGGLQGKVGGRGGGRGGGKPDQAAILMASLFGDDDEEGTPQRRRASGGGGRGRPRGGGSRGGEDVDLDAQEVPDDIYAGEQDDELRPAKPGQAEDWEHEELPDDDDLGQGEDESEKLEDDPGERRKLGIEGGSDEEEAPAEEEEEEGEEEKKRKLQEQASQEPGAMYEGMEQPTCDTNKQDVSLGVGEGDEDLDLDAMAMDAFGAAPRTAGGSAKRKLVEEEDTPVIAGQPPRPGAPKRPRNAAAVPAEKGIPATKQEPTAAAQPSIPASEVTAEEIAAELRKAGGGLPLQQIKSIFMARIKGKAATDAFKSKLLQGGSRTGGPGFRQYMAVLAEHFDVLVEEFLDSPKRAHASMLRYRGKRRAWDQFSSRLLRTLCKGSDPKRPVVVGVGASKMPPAAHGVQKFSAPTQLKKALLRAMLRGVGHSKLHPRMLMSLNEYKTTVSCSRCGARTVEPMVRDFVTHLQRKSRRLRECPVCKEEYFKQQQQQVEGMAEGGGEQQQVEGMAEGGGEQQQVEGMAEGGGERQPVEGVSETDEEEEQEEGMSRQGSTDWAGMDLDEEEEEVGGVGEGGMGANEAEGEVHAAVPGRRRERVKKPQRSYQMHRDVNAAWNLWEVCVAQYFGHPRPRYLRADTAA

SEQ ID NO: 4466 - protein, 262 aa, Dunaliella primolecta
MLLKHLQVHVLVNKQTEGSDPKRPVVVGVGASKMPPAAHGVQKFSAPTQLKKALLRAMLRGVGHSKLHPRMLMSLNEYKTTVSCSRCGARTVEPMVRDFVSHLQRKSRRLRECPVCKEEYFKQQQQQQIEGMAEGGGEQQQVEGMAEGGGEQQPVEGVSETDEEVEKEEGMSRHGSTDWAGMDLDEEEEEVGGVVEGGMGANEAEGEVHAVVPGRRRERVKKPQRSYQMHRDVNAAWNLWEVCVAQYFGHPRPGYLRADTAA

SEQ ID NO: 4467 - protein, 305 aa, Dunaliella primolecta
MAVLAEHFDVLVEEFLDSPKRAHASMLRYRGKRRAWDQFSSRLLRTLCKGSDPKRPVVFGVGASKMPPAAHGVQKFSAPTQLKKALLRAMLRGVGHSKLHPRMLMSLNEYKTTVSCSRCGARTVEPMVRDFVSHLQRKSRRLRECPVCNEEYFKQQQQIEGMAEGGGEQQQVEGMAEGGGEQQQVEGMAEGGGEQQPVEGVSETDEEVEKEEGMSRQGSTGWAGMDLDEEEEEVGGVGEGGMGANEAEGEVHAAVPGRRRERVKKPQRSYQMHRDVNAAWNLWEVCVAQYFGHPRPRYLRADTAA

SEQ ID NO: 4468 - protein, 975 aa, Dunaliella primolecta
LRHRCQEEIQQKKLQRLQQKQASTPAAPPKRPVGRPKGSKNPAPPLPNHNPAPVLPSGEPPQQQQQQLQAPQQQDPQQQQQQAQKHKRDPKRPVVVGVGASKMPPAAHGVQKFTAPTQLKKALLRALLRGVGHSKLHPRMLTGLNEFKTTVSCSRCGARTVEPMVRDFVSHLPRKSRRLRECPVCKDEYLKQQQQQVEGVAEGGGGQQQVEGMAEGGGGQQPVEGMAEGGGEQQQIEGMAEGVGEQQPVEGVSETDEEEEQEEGMSRQGSTDWAGMDLDDEEEEVGGVEEGGMGGNEAEGGVHAAVPGRRRERAKKPQLSYQMHRDVNAAWNLWELWSPQPQQQLQPQQLQQHDILPWEQQESKKQSAGSVMQQSLVALPLPLEERGAVSSQALLDSQEQIRGLQEQLAKNASQRLAYDAASLRAALGDNDFTLTADTLKFLVDRPIQALQVCKALGKIPAREKDMLTHHMRFFYGSYPNGYSENTWNTWYGYMWRLLRWIGAYAAGTMLPVDTAAHHIEQLEARYINGSTPMAHWHGICRDLAADPRLCPGTPLNRRLKEDGWSIASPTDLVHGIFDTKFKLNVDRMGLDPQRIRDICAWIIEILHYRQCAADLRTEQVVDQSDVGHRPSFGAPIGNMRAYAWRMFSSKAAALPSVPIDEDEQAQGWVRRHYEHELQVQSISPRPQLQEGREAATSARGQPFQRRQSEGSSASISTLDEETQHASDWSGRGTNAGPARASTGLDEFAAGFQAAANELSWIAPGSTPMPHWHGICRDLAADPRLCPGTPLNRRLKEDGWSIASPTDLVHGIFDTKFKLNVDRMGLDPQSIRDICAWIIEILHYRQCAADLRTEQVVDQSDVGHRPSFGAPIGNMRAYAWRMFSSKAAALPSVPIDEDEQAQGWVRRHYEHELQVQSISPRPQLQEGREAATSARGQPFQRRQSEGSSASISTLDEYMSLNLKFMQIVSSQAKAKF

SEQ ID NO: 4469 - protein, 1184 aa, Dunaliella primolecta
AGSSNKQEAGELMLPSHTEEQTALAAQQQQQQQQRHRRHHMHRRNVSASDAGCLPGLGTSVPVAAPSSASNLLFAPRSTEAAPSNTLLGMRRISAGGVTSDTTFPRHSEPLLPGLRSPRASGLPPTSPPSSNAPPPSFSTSARSQNQPPHRRTPSDAPSSSRPHHRHTRTVSATESQIEATAAVISGSLGGGGEGLTGLALVGLGPTPGHSRNVSGSMPGLSRGHTRNISGTFTDCSDGDNGCGVCFDNPSNLLLRGCGHKICVQCYRQLVRPGAAPSARCPFCSAEAGGRPDVDKELRGAGGWRGMGAFLLHGEQISPSASNPQQSTSCHCCTVHVQGALLRRVKEYLHCVQLPLEDNGWQESRQELFEMVVHGTVEAHVQDMSPALAHCLEQLRVTLQPHREYMGPLPRRISKPLQDLLPLHLFLTRHQRPGAPTPPAPLPSEEEHPEDAGHAGLAAALDERQAFTPARGAAAPVSPTPAATEASAAPPHPPPQLHAFEASSAASPPPSPSPPKIVYVSSGQATPPNTRPFMPLSPLPRLESAALDQMIVVDMCSGLRKERGYAQVLQELLPGMPEPQRRNAIPLVKLLPELSADQVTQRRGAAQKDKRKKGKARHRVGGGVIAKHLEPHFARTDGVALCICYRPIQHAPVHEAEHLWQKHVRRVVDLDKAFWKGEKLPSGSMGGKGGVPGGGREGVRGVDSAGASSSAGEASLGAGESGGVPKLQRNEHGDYLFHWVEGNQLLPEAVAVDPGGAFKGYGAARSTLPAHRHPHELPTRAWLKQGEGVSAIPTPAQVPLPKQHMASSAASASPGSKWQAKRKARKERVMRDTHVESTVSLSHGEYVGAWRQKKQRRQEQQWQSNPPVKAALEDLSRQGGSRTGGPGFRQYMAVLAEHFDVLVEEFLDSPKRAHASMLRYRGKRRAWDQFSSRLLRTLCKGSDPKRPVVVGVGASKMPPAAHGVQKFSAPTQLKKALLRAMLRGVGHSKLHPRMLMSLNEYKTTVSCSRCGARTVEPMVRDFVTHLQRKSWRLRECPVCKEEYFKQQQQQVEGMAEGGGEQQQVEGMAEGGGEQQPVEGVSETDEEEEQEEGMSRQGSTDWAGMDLDEEEEEVGGVGEGGMGANEAEGEVHAAVPGRRRERVKKPQRSYQMHRDVNAAWNLWEVCVAQYFGHPRPSYLRADTAA

SEQ ID NO: 4470 - protein, 347 aa, Hydraecia micacea
MLCPLLEPEKKLKILLEIRRNVRDLSRVYIELGVCRLSMTLCFYEDYYKKTASDVSEKHDILNFLYAMKGKGSYAEAYRSCFGPRVYDGKLRSFVVQELAKQYETVLHSTRLARGWHERIRRVDPTAISSVWGNIANYLQELWAPWLAVGSRFGCSLQTDEVSVSLSMNRIVKQPVIKKQKRAYERIIAVDPGSRVPVSTVESVEFQRIAKKYVRSHTLEWKRDRVRTKLTKSIEVAEQTDRERSSFPISSKNRSHVIEYTVFRMKWIDARQAPYELHAKLTRLKVDKYLRTARCEEKIIKEVFGGRGVEPVLVLYGAGSTFMNRATFSGRKYKHDSLIRRLRQTQA

SEQ ID NO: 4471 - protein, 478 aa, Agrochola circellaris
MKTAIQLPSKPDVLNFIYAMKGKGPYADSYRAIFGNRKFDGRLRSFVVQEMAKQYETVLHTNISTHAYARLARYFNVKRNDPALYAAFFKKELPADNEEMRRVCTIINVDTLQGAKWWTTIPEWLKIQAKLEDFKLFPQPSHGHKHLTYTSIGWHELLRRVDPKSITSCWARIVDHRRELWARIVDHRRELWAPWLDVDMKKFGCSLQTDGISVSLSMNRILKNVAPTLTKRSKKTYDRIIAVDPGSRIPVAAVESKRLQFRRITKKFVRSHTLEWKRERIRNKLCRVSEEAEQEAREKLTFPVSSKNTSHVVAYTVFRMTWFDVRQEPYEKHAKLTRLGLDKYIRTAKCEEKIVKEVFDGGGVESTLVLYGAGSKFMNTASFSGRKFKHDSLIKRLRSKRHIDVKVVDEQYTSQACSSCNAKTREFQKIVMNHKLRWGVCRNCNSEFDRDVNAAKNILINYTRSALCRPVCSTNGAS

SEQ ID NO: 4472 - protein, 391 aa, Agrochola circellaris
MKTAIQLPSKPDVLNFIYAMKGKGPYADSYRAIFGDRKFDGRLRSFVVQEMAKQYETVLHTNISTHAYARLARYFKVKRNDPALYAAFFKKELPNDNEEMRRVCTIIIVDTLQGAKWWTTIPEWLKIQAKLKDFKLFPQPSHGRKHLTYTSIGWHELLRRVDPKSITSCWARIVDHRRELWAPWLDVDMKKIGCSLQTDGISVSLSMNRIKKNVAPTLTKRSKKTYDRIIAVDPGSQIPVAAVESKRLQFRRITKKFVRAHTLEWKRERIRNKLCRVSEEAEQKAREKLTFPVSSKNTSHVVEYTVFRMTWFDVRQEPYEKHAKLTRLGLDKYIRTAKCEEKIVKEVFDGGGVESTLVLYGAGSKFMNTASFSGRKFKHDSLIKRLRSSVT

SEQ ID NO: 4473 - protein, 386 aa, Agrochola circellaris
MKQNFWKHVPLFVKIQHELYENDKKSFNVFPIYKHGLKHITYDSRCLHELLRRVDAENTPSTWVKFSESNPKQYWRRYFSLPKNFGWSFNTDGVCVSLSMNRLVTKKDKFKTKRLKKEETLNENENQLYKNYRKIIAVDPGAKTPIVTCNRKSSSNDTFEYKTLKKGRVVCEAKEHQREKKRLKLTKDVDLKIRNDRESLEKELGFIISCKNSNVEDYTKFQLKWFDEKQKIYEQRRLQRLKFDKYINDQKTNHKIVDEYFGKDPDTLVVYGAGFDFMNKGTFKGHRKFRHNDILKIVKQRKNLSLYIINEAFTTKNCSKCYEKKIQQKLHVSKSPHRYVYCSVCRKGIHRDKNGAKNILLKFEYKLSSIPSFADTDMNFMGGGSS

SEQ ID NO: 4474 - protein, 555 aa, Agrochola circellaris
MAACKTCGGSDHTRTSSKKCKNYLPPIRKRNLSESKANQLEIYTVKRGLASCLCPLLDPEKKLKLLTEIRRDVRDLSRVYIELGVWYNYYMKTTAQLPPKPDVLNFIYAMKGKGPYANAYIKMFGERKFDDKLRSFVVQEMAKQYETVLHTNISTHAYSRLARYFNVKRNDPTLFSAFFKKVLPDDNEEMRQVCSIINVDTVGGAKWWATVPEWLKIQAKLKDFKLFPQPSHGLKHITYTSTGWHELLRRVDPKSITSVWSRIEDHRRELWAPWLNVDMKNFGCSLQTDGFNVSLSMNRIKKPDMGQSPKRSKKSYDRIIAVDPGSRIPVAAVESRRFNFQRVTKKYVRSHTLEWKRARVRNKLCRVSEEAEKKAREKLEFPVSSKNVTHVVEYTVFRMHWFNVRQEPYERHAKLTRLKLDKYIRTAKCEEKIIKEIFDDSSNTLVLYGAGSKFMNNASFSGRKFKHDSLIKRLRSKPNIDVEVVDEQYTSQACSSCNATTGQFQKIVMNHRLRWGVCPNCNSEFDRDTNAAKNILINYTRSGICRPGCSTNGAS

SEQ ID NO: 4475 - protein, 433 aa, Agrochola circellaris
MFGERKFDDKLRSFVVQEMAKQYETVLHTNISTHAYSRLARYFNVKRNDPTLFSALFKKVLPDDNEEMRQVCSIINVDTVGGAKWWATVPEWLKIQAKLKDFKLFPQPSHGLKHITYTSTGWHELLRRVDPKSITSVWSRIEDHRRELWAPWLNVDMKKFGCSLQTDGFNVSLSMNRIKKPDMGQSPKRSKKSYDRIIAVDPGSRIPVAAVESRRFNFQRVTKKYVRSHTLEWKRARVRNKLCRVSEEAEKKAREKLEFPVSSKNVTHVVEYTVFRMHWFNVRQEPYERHAKLTRLKLDKYIRTAKCEEKIIKEIFDDSSNTLVLYGAGSKFMNNASFSGRKFKHDSLIKRLRSKPNIDVEVVDEQYTSQACSSCNATTGQFQKIVMNHRLRWGVCPNCNSEFDRDTNAAKNILINYTRSAICRPGCSTNGAS

SEQ ID NO: 4476 - protein, 509 aa, Agrochola circellaris
MPCPSCGKDDHARSSSSKCLKRKIRVRETELEEDQEISVYCIKKGLCSFICHLSEKKEKLLKTIRSDVKELSRLSIELSYLVNYFFKKYYSHEDFQQLFPKFDPLHDNEIGRWFEINKISEKEMKQNFWKHVPLFVKIQHELYENDKKSFNVFPIYKHGLKHITYDSRCLHELLRRVDAENTPSTWVKFSESNPKQYWRRYFSLPKNFGWSFNTDGVCVSLSMNRLVTKKDKFKTKRLKKEETLNENENQLYKNYRKIIAVDPGAKTPIVTCNRKSSSNDTFEYKTLKKGRVVCEAKEHQREKKRLKLTKDVDLKIRNDRESLEKELGFIISCKNSNVEDYTKFQLKWFDEKQKIYEQRRLQRLKFDKYINDQKTNHKIVDEYFGKDPDTLVVYGAGFDFMNKGTFKGHRKFRHNDILKIVKQRKNLSLYIINEAFTTKNCSKCYEKKIQQKLHVSKSPHRYVYCSVCRKGIHRDKNGAKNILLKFEYKLSSIPSFADTDMNFMGGGSS

SEQ ID NO: 4477 - protein, 776 aa, Agrochola circellaris
MPIPKIIVDRKRASDHRRGKTAVITSSPYKNELITISQNKTPKLNLNQPPKTKKPKQKIINDNICLYCLEEYGSSRVDEGWVQCTECKGWAHEGCTGYDSEDLDNFVYPRVHSSLYNPLSSLVSISSMAACKTCGGSDHTRTSSKKCKNYLPPIRKRNLSESKANQLEIYTVKRGLASCLCPLLDPEKKLKLLTEIRRDVRDLSRVYIELGVWYNYYMKTTAQLPPKPDVLNFIYAMKGKGPYANAYIKMFGERKFDDKLRSFVVQEMAKQYETVLHTNISTHAYSRLARYFNVKRNDPTLFSAFFKKVLPDDNEEMRQVCSIINVDTVGGAKWWATVPEWLKIQAKLKDFKLFPQPSHGLKHITYTSTGWHELLRRVDPKSITSVWSRIEDHRRELWAPWLNVDMKKFGCSLQTDGFNVSLSMNRIKKPDMGQSPKRSKKSYDRIIAVDPGSRIPGAAVESRRFNFQRVTKKYVRSHTLEWKRARVRNKLCRVSEEAEKKAREKLEFPVSSKLLMSWNTLFLECTGSTGRKFKHDSLIKRLRSKPNIDVEVVDEQYTSQACSSCNATTGQFQKIVMNHRLRWGVCPNCNSEFDRDTNAAKNILINYTRSAICIHGDDIIGPVFIDGTLTGERFVNLLNDTVSEYTDSLNAHRYQRMWYQLDGAPAHSVTAARQWLNNAFGAQWIGRFGPRRWPARSPDLTPLDFFLWGFIKDDVYAENIDSVEQLRLRITNAFAKLREIALRGNLFSKVRDNMSVRSRSGMLLNLKILIMQIFSV

SEQ ID NO: 4478 - protein, 680 aa, Griposia aprilina
MNRVIKKDQKFKSKKVKKCEESLENTAVGSKRNYSKVIAVDPGAKTPIVTCTRNGDDFTYKVLKKERVMYESKECHRVRKRLRYIKDIEDRIRVDSESFEKETGVELTRKSKNTEIYTRFQLKWFDEKQRMYEQRRVQRLKFDKYINDQKMLNKIVDEYFGKEPDTLVVYGAGFDFMNKGTFKGHRKFRHNEVLKIAKQRKNLSVFVINEAFTTKIVVTATNLVQRILYVYQSLHTVTYTAVATVLQEKCFYIPRGTRVCEEHMLDSVWQNIESSTRRILSEFAPSHLKDMMDMLRTRKVFLDFDRRSLINNSIFHYYIGFSKSQFQEILQSCPSISQRYKNKAGRALATVITKLHTGESNQRLSQIFNMSRKTLEKTMRLVRQDLISEFVPLHLGYNHLTRQDVISRCLTIPNTLFGNPDGSLNERKAIIILDGTYIYLQKSSNYYFQRKSYSLHKFRDLLKPFLLVCPDGHIIDIYGLYEATKSDATILSEIFKNPYDPFHWFFHEDDVLILDRGFRDCIEDVESCGYRAYMPSSKDENEYQLTTQQANDSRKVTMCRWVVETINGRLKNQFRQLRSQNFNVAASHLFEEIRIAAALLNAFGVPLTDHRLTQEIVNRIPHHSPRNQLAEYVITNNMNRRRADFESMNAEVPGLQGRSYRRICRINYTGPPGHGGPQSV

SEQ ID NO: 4479 - protein, 602 aa, Griposia aprilina
MPCPSCGKDDHARSSSSKCLNRKRRIRETDLDSNQEVSIYNVKKGLTSVLCPLSDCKEAIILAIRDDVREMSRLSIELSYLINFFYKHYSTRDDFHLLFPKFDALQFTYALKGAEHKLNDPDDVISTYTSWRKNNTFYDGRLRSFTLMQIAKQYSTILETNIQTHAFKRLKRYMYHKFGEDMDKSEVHSSTYDAYYNVMCKSNRIGEWFTENKINSKELKKDFWKFIPLLLRIQHELYEMKKPSFNIFPIYSHGLKFIKYDSRCVHELLRRVDQKNTPSVWSIFSENTTMCWNRHFTLPRKFGYSFSTDGVSVCLSMNRVIKKDQKFKSKKVKKCEESLENTAVGSKRNYSKVIAVDPGAKTPIVTCTRNGDDFTYKVLKKERVMYESKECHRVRKILRSINDIEDRIRVDRESFEKETGVELTRKSKNTEIYTRFQLKWFDEKQRVYEQRRVQRLKFDKYINDQKMLNKIVDEYFGKEPDTLVVYGAGFDFMNKGTFKGHRKFRHNEVLKIAKQRKNLSVFVINEAFTTNNCSYCYESGAKNTLRVSKSPHRYVYCSVCRKGIHRDKNGAKNILLKYEYTKLPIPLSSVGTDMDRVDGGSL

SEQ ID NO: 4480 - protein, 228 aa, Agrochola macilenta
MYKILKKERVVYESKEHHRARKRLRFIKDVEDRIRLDRETTELETCIALTPKSCNVTAYTRFQLKWFNEKQRVYEQRRLQRLKFDKFMNDQKILNKLVDEYFGNEPDTLVVYGAGFDFMNKGTFKGHRKFRHNEVLKIAKQRKNLSVFVINEAFTTKNCSYCYESGAKNTLRVSKSPHRYVYCSVCRKGIHRDKNGAKNILLKYEYTKLPVGLSSSGSDMDRVDGGSS

SEQ ID NO: 4481 - protein, 565 aa, Erebia ligea
MSSGVQTCGACGGTDHSRRTSKKCKFHLPSIRKRNLQEDEEIEVYMIKRGLVSVLCPLLEPEKKLRLLAEIRRDVRDLSRVYVELGIWINYYMKTAMPSKKPDILNFLYAMKGKGPYVDAYKSFFGKHRTYDGKLRSFVVQEMAKQYETTLHTNVSLHAYGRLARYFKLKRNDPKLFDAYFKKILPVNDDDTAAEMRRICSVINVDTIKNASVWWSTVPMWIEIQEKLQDFRLFPQPSHGLKHLTYTSRGWHELLRRVDPSSISGDWRKIIDHMRELWTPWLNVDVKKFGCCLQTDGISVSLSMNRQVVKKNIESKRKKTTYDRIIAVDPGSRVPVAAVDDTFKFKRITKRYVRSHTLEWKRERVRLRLTKDVLFAEQKARESLDYVISSKNKSRVVEYTRFRMQWFDRRQEPYEKHARLTRLNLDKYMRTARCEEEIVRSVFDGGGPLSTLVLYGKGSKFMNVASFSGRKFRHDSLIRRLRAKRNIVAVEMTDEAYTSQACSTCNQRDGRFSKVSMDKRTRRGVCPNCRDEFDRDANAAKNILINYKRSTVCGPGRFSNKERAS

SEQ ID NO: 4482 - protein, 623 aa, Erebia ligea
MPAHLPPAPAPPCPQPPVLRHPAPHRTSCKGDSGVALASQSFGMLLSHPERMHLKSFTMSSGVQTCGACGGTDHSRRTSKKCKFHLPSIRKRNLQEDEEIEVYMIKRGLVSVLCPLLEPEKKLRLLAEIRRDVRDLSRVYVELGIWINYYMKTAMPSKKPDILNFLYAMKGKGPYVDAYKSFFGKHRTYDGKLRSFVVQEMAKQYETTLHTNVSLHAYGRLARYFKLKRNDPKLFDAYFKKILPVNDDDTAAEMRRICSVINVDTIKNASAWWSTVPMWIEIQEKLQDFRLFPQPSHGLKHLTYTSRGWHELLRRVDPSSISGDWRKIIDHMRELWTPWLNVDVKKFGCCLQTDGISVSLSMNRQVVKKNIESKRKKTTYDRIIAVDPGSRVPVAAVDDTFKFKRLTKRYVRSHTLEWKRERVRLRLTKDVLFAEQKARESLDYVISSKNKSRVVEYTRFRMQWFDRRQEPYEKHARLTRLNLDKYMRTARCEEEIVRSVFDGGGPLSTLVLYGKGSKFMNVASFSGRKFRHDSLIRRLRAKRNIVAVEMTDEAYTSQACSTCNQRDGRFSKVSMDKRTRRGVCPNCRDEFDRDANAAKNILINYKRSTVCGPGRFSNKERAS

SEQ ID NO: 4483 - protein, 292 aa, Erebia ligea
MRELWTPWLNVDVKKFGCCLQTDGISVSLSMNRQVVKKNIESKRKKTTYDRIIAVDPGSRVPVAAVDDTFKFKRITKRYVRSHTLEWKRERVRLRLTKDVLFAEQKARESLDYVISSKNKSRVVEYTRFRMQWFDRRQEPYEKHARLTRLNLDKYMRTARCEEEIVRSVFDGGGPLSTLVLYGKGSKFMNVASFSGRKFRHDSLIRRLRAKRNIVAVEMTDEAYTSQACSTCNQRDGRFSKVSMDKRTRRGVCPNCRDEFDRDANAAKNILINYKRSTVCGPGRFSNKERAS

SEQ ID NO: 4484 - protein, 528 aa, Dryobotodes eremita
MNRIVQKGQKYKLKKAKKSEESLENTTVGGRRNYSKIIAVGPGAKTPIVTCTHNGDDFAYKVLKKEGVVYESKEYHRTRKRLSFIKDIEERIKLDRESTEQESGVELTRKSQNAEDYTRFQLKWFDEKQRLYELRRVQRLKFDKYINDQKTLHKIADEYFGKVPDTLVAYGTRFDFMNKGTLKGHRKFRHNEVLKIIKQRKNLSVFVINEAFTTKNCSYCHDREHAQRKLSVSKSPLRILQCKSISTIRRIAIEGQRNKGVFSIPGNHRTGRPKKELDNFDMGAIRQKVQFFYTVKKIIQKVPDRQALMEKPNIAAKRDKLDKIIKNRNLPDDLRKDIIYLDESYINTSYKLKKQRWQSLNVSGIKESVSKGKRYIIIHAGNENGFVPNALLIFGGKNKNEDYHSEMNKSNFTKWVKEKLIPNLSKPSIIVMDNAPYHSVIRNKAPTPASKVGEIKLWLSENNVPFEESARKLNLLMLVKRHKPMPIYEIDELISEHFHMVIRLPPYHCDLNPIELIWGSLKQKIFLT

SEQ ID NO: 4485 - protein, 380 aa, Dryobotodes eremita
MYHKFGEDMNKSEVHSSTYDAYYNSVRKPNSIGAWFSDNLVTDKEVKTNFWQFIPLFLRIQHELHEQRKSSFNVFPNYSHGIKFITYDSRCMHELLRRVDPANTPSNWPKFSENTTMYLNRHFTLPQNTTVGGRRNYSKIKAVDPGAKTPIVTCTRNGDDFSYKVLKKERVVYESKEYHRTRKRLSFIKDIEERIKLDRESTEQESGVELTRKSQNQEDYTRFQLKWFDEKQRLYEQRRVQRLKFDKYINDQKMLHKIVDEYFGKVPDTLVVYGAGFDFMNKGTFKGHRKFRHNEVLKIIKQRKNLSVFVINEAFTTKNCSYCHDREHAQRKLSVSKSPHRYVYCSVCRKGIHRDKNGAKTYYSNMRTSCRLVLSLSVLI

SEQ ID NO: 4486 - protein, 529 aa, Dryobotodes eremita
MEMVCPSCGKDDHQRSSSAKCSNRKRRIRETGLDSDQEISAYSVKKGLTSVLCPLSARKDAIVLAIRDDVREMSRLSIELSYVVNFFYKHYSNRNDFHILFPKFDALQFSYALKGAKYKLNDPDNVISTYLTLRNNNTLYDGRLTSFQLCRLENNTVQFSRQIYQLMLSKDSKRYMYHKFGEDMDKSEVHSSTYDAYYNSVRKPNSIGAWFSDNLVTDKDVKTNFWQFIPLFLRIQHELHEQRKSSFNVFPNYSHGLKFMTYDSRCMLELLRRVDPANTAVDPGAKTPIVTSTCTRNGVDFSYKVLKKERVVYESKEYHRTRKRLSFIKDIEERIKLDRESTEQESGVELTRKSQNAEDYTRFQLKWFNEKQRLYEQRRVQRLKFDKYINDEKILHKILDEYFGKVPDTLVVYGAGFDFMNKGTFKGHRKFRHNEVLKIIKQRKNLSVFVINEAFTTKNCSYCHDREHAQRKLSVSKSPHRYVYCSVCRKGIHRDKNGAKNILLKYENKLPISLSSVGTDMNLVDGGSS

SEQ ID NO: 4487 - protein, 437 aa, Philereme vetulata
MYYKFGTDMDKSEVHSSTYDAYYNGVCKSIRIGEWFTENKINSKELKKNFWRFIPLFLRIQHELYDQGKLSFNVFPIYSHGLKFITYDSRCMHELLRRVDPNKTPSVWPVFSENTTMYWNRHFILPRKFGYSFSTDGVSVCLSMNRIVQKGQKFKSKKAKKCEESLENTAAVGSKRNYSKVIAVDPGAKTQIVTCTRNGGDFSYKVLKKERVVYESKEYHRARKRLRFLKDIEERIKADRESTEQEIGIELTRKSQNAEPYTRFQLKWFDEKQRIYEQRRVQRLKFDKYINDQKMLHKIVDEYFGKEPDTLVVYGAGFDFMNKGTFKGHRKFRHHDVIKIIKQRRNLSVYVINEAYTTKNCSYCHDRDRIQQKLSVSKSPHRYVHCSVCRKGIHRDKNGAKNILLKYENMKKLPISLSSIGTDMSLVDGRSSQGSLS

SEQ ID NO: 4488 - protein, 610 aa, Philereme vetulata
MPCPSCGKDDHQRSSSAKCLNRKRRVREIGLDSDQEVSVYTVKKGLTSVLCPLNDCKEAIVCAIRDDVREMSRLSIELSYLVNFFYKHYSTRDDFHLLLPKFDALQFTYALKGVKHKLTDPDNVISTYISLRRNNTFYDGRSRSFTIMQIAKQYSTILETNIQTHAFKRLKRYMYHKFGTDMDKSEVHSSTYDAYYNGVCKSNRIGEWFTENKINSKELKKNFWRFIPLFLRIQHELYDQGKLSFNVFPIYSHGLKFITYDSRCMHELLRRVDPNKTPSVWPVFSENTTMYWNRHFILPRKFGYSFSTDGVSVCLSMNRIVQKGQKFKSKKAKKCEESLENTAAVGSKRNYSKVIAVDPRAKTPIVTCTRNGGDFSYKVLKKERVVYESKECHRARKRLRFLKDIEERIKADRESTEQEIGIELTRKSQNAEPYTRFQLKWFDEKQRIYEQRRVQRLKFDKYINDQKMLHKIVDEYFGKEPDTLVVYGAGFDFMNKGTFKGHRKFRHHDVIKIIKQRRNLSVYVINEAYTTKNCSYCHDRDRIQQKLSVSKCPHRYVHCSVCRKGIHRDKNGAKNILLKYENMKKLPISLSSIGTDMSLVDGGSSQGSLS

SEQ ID NO: 4489 - protein, 686 aa, Philereme vetulata
MPCPSCGKDDHQRSSSAKCLNRKRRVREIGLDSDQEVSVYTVKKGLISVLCPLNDCKEAIVCAIRDDVREMSRLSIELSYLVNFFYKHYSTRDDFHLLLPKFDALQFTYALKGVKHKLTDPDNVISTYISLRRNNTFYDGRSRSCTIMQIAKQYSTILETNIQTHAFKRLKRYMYHKFGTDMDKSEVHSSTYDAYYNGHELYDQGKLSFNVFPIYSHGLKFITYDSRCMHELLRRVDPNKTPSVWPVFSENTTMYWNRHFILPRKFGYSFSTDGVSVCLSMNRIVQKGQKFKSKKAKKCEESLENTAAVGSKRNYSKVIAVDPGAKTPIVTCTRNGGDFSYKLLKKERVVYESKDCHRARKRLRFLKDIEERIKADRESTEQEIGIELTRKSQNAEPYTRFQLKWFDEKQRIYEQRRVQRLKFDKYINDQKMLHKIVDEYFGKEPDTLVVYGAGFDFMNKGTFKGHRKFRHHDVIKIIKQRRNLSVYVINEAYTTKNCSYCHDRDRIQQKLSVSKSPHRYVHCSVCRKGIHRDKNGAKNILLKYENMKKLPISLSSIGTDMSLVDGGSSQEESYNKQNDKVYAHSSEEASNRIPRVQRGHFPSSLMVWLRVSYWGLTEVHFCEKGVKTNAVVYQNTVLMNLVEPVSHTMFKNRHWVFQQDSAPAHRAKITQDWLAAREIDFIRHED

SEQ ID NO: 4490 - protein, 349 aa, Philereme vetulata
MPCPSCGKDDHQRSSSAKCLNRKRRVREIGLDSDQEVSVYTVKKGLTSVLCPLNDCKEAIVCAIRDDVREMSRLSIELSYLHELYDQGKLSFNVFPIYSHGLKFITYDSRCMHELLRRVDPNKTPSVWPVFSENTTMYWNRHFILPRKFGYSFSTDGVSVCLSMNRIVQKGQKFKSKKAKKCEESLENTAAVGSKRNYSKVIAVDPGAKTPIVTCTRNGGDFSYKVLKKERVVYESKECHRARKRLRFLKDIEERIKADRESTEQEIGIELTRKSQNAEPYTRFLLKWFDEKQRIYEQRRVQRLKFDKYINDQKVLHKIVDEYFGKEPDTSGLRCRFRFHEQGNVQGSS

SEQ ID NO: 4491 - protein, 610 aa, Philereme vetulata
MPCPSCGKDDHQRSSSAKCLNRKRRVREIGLDSDQEVSVYTVKKGLTSVLCPLNDCKEAIVCAIRDDVREMSRLSIELSYLVNYFYKHYSTRDDFHLLLPKFDALQFTYALKGVKHKLTDPDNVISTYISLRRNNTFYDGRSRSFTIMQIAKQYSTILETNIQTHAFKRLKRYMYHKFGTDMDKSEVHSSTYDAYYNGVCKSNRIGEWFTENKINSKELKKNFWRFIPLFLRIQHELYDQGKLSFNVFPIYSHGLKFITYDSRCMHELLRRVDPNKTPSVWPVFSENTTMYWNRHFILPRKFGYSFSTDGVSVCLSMNRIVQKGQKFKSKKAKKCEESLENTAAVGSKRNYSKVIAVDPGAKTPIVTCTRNGGDFSYKVLKKERVVYESKECHRARKRLRFLKDIEERIKADRESTEQEIGIELTRKSQNAEPYTRFQLKWFDEKQRIYEQRRVQRLKFDKYINDQKMLHKIVDEYFGKEPDTLVVYGAGFDFMNKGTFKGHRKFRHHDVIKIIKQRRNLSVYVINEAYTTKNCSYCHDRDRIQQKLSVSKSPHRYVHCSVCRKGIHRDKNGAKNILLKYENMKKLPISLSSIGTDMSLVDGGSSQGSLS

SEQ ID NO: 4492 - protein, 485 aa, Philereme vetulata
MPCPSCGKDDRQRSSSAKCLNRKRRVREIGLDSDQEVSVYTVKKGLTSVLCPLNDCKEAIVCAIRDDVREMSRLSIELSYLVNFFYKHYSTRDDFHLLLPKFDALQFTYALKGVKHKLTDPDNVISTYISLRRNNTFYDGRSRSFTIMQIAKQYSTILETNIQTHAFKRLKRYMYHKFGTDMDKSEVHSSTYDAYYNGGQNFKSKKAKKCEESLENTAAVGSKRNYSKVIAVDPGAKTPIVTCTRNGGDFSYKVLKKERVVYESKECHRARKRLRFLKDIEERIKADRESTEQEIGIELTRKSQNAEPYTRFQLKWFDEKQRIYEQRRVQRLKFDKYINDQKMLHKIVDEYFGKEPDTLVVYGAGFDFMNKGTFKGHRKFRHHDVIKIIKQRRNLSVYVINEAYTTKNCSYCHDRDRIQQKLSVSKSPHRYVHCSVCRKGIHRDKNGAKNILLKYENMKKLPISLSSIGTDMSLVDGGSSQGSLS

SEQ ID NO: 4493 - protein, 610 aa, Philereme vetulata
MPCPSCGKDDHQRSSSAKCLNRKRRVREIGLDSDQEVSVYTVKKGLTSVLCPLNDCKEAIVCAIRDDVREMSRLSIELSYLVNYFYKHYSTRDDFHLLLPKFDALQFTYALKGVKHKLTDPDNVISTYISLRRNNTFYDGRSRSFTIMQIAKQYSTILETNIQTHAFKRLKRYMYHKFGTDMDKSEVHSSTYDAYYNGVCKSNRIGEWFTENKINSKELKKNFWRFIPLFLRIQHELYDQGKLSFNVFPIYSHGLKFITYDSRCMHELLRRVDPNKTPSVWPVFSENTTMYWNRHFILPRKFGYSFSTDGVNVCLSMNRIVQKGQKFKSKKAKKCEESLENTAAVGSKRNYSKVIAVDPGAKTPIVTCTRNGGDFSYKVLKKERVVYESKECHRARKRLRFLKDIEERIKADRESTEQEIGIELTRKSQNAEPYTRFQLKWFDEKQRIYEQRRVQRLKFDKYINDQKMLHKIVDEYFGKEPDTLVVYGAGFDFMNKGTFKGHRKFRHHDVIKIIKQRRNLSVYVINEAYTTKNCSYCHDRDRIQQKLSVSKSPHRYVHCSVCRKGIHRDKNGAKNILLKYENMKKLPISLSSIGTDMSLVDGGSSQGSLS

SEQ ID NO: 4494 - protein, 610 aa, Philereme vetulata
MPCPSCGKDDHQRSSSAKCLNRKRRVREIGLDSDQEVSVYTVKKGLTSVLCPLNDCKEAIVCAIRDDVREMSRLSIELSYLVNFFYKHYSTRDDFHLLLPKFDALQFTYALKGVKHKLTDPDNVISTYISLRRNNTFYDGRSRSFTIMQIAKQYSTILETNIQTHAFKRLKRYMYHKFGTDMDKSEVHSSTYDAYYNGVCKSNRIGEWFTENKINSKELKKNFWRFIPLFLRIQHELYDQGKLSFNVFPIYSHGLKFITYDSRCMHELLRRVDPNKTPSVWPVFSENTTMYWNRHFILPRKFGYSFSTDGVSVCLSMNRIVQKGQKFKSKKAKKCEESLENTAAVGSKRNYSKVIAVDPGAKTPIVTCTRNGGDFSYKVLKKERVVYESKECHRARKRLRFLKDIEERIKADRESTEQEIGIELTRKSQNAEPYTRFQLKWFDEKQRIYEQRRVQRLKFDKYINDQKMLHKIVDEYFGKEPDTLVVYGAGFDFMNKGTFKGHRKFRHHDVIKIIKQRRNLSVYVINEAYTTKNCSYCHDRDRIQQKLSVSKCPHRYVHCSVCRKGIHRDKNGAKNILLKYENMKKLPISLSSIGTDMSLVDGGSSQGSLS

SEQ ID NO: 4495 - protein, 556 aa, Euplexia lucipara
MAACKTCGGPDHTRTSSKKCKNYLPPIRKRHLSESKANQLEIYTVKRGLASCLCPLLTPEKKLDLLTEIRRGVRDLSRVYIELGVWYNYYMKMSTQLPPKPDVLNFIYAMKGKGPYADAYIKMFGERKFDDKLRTFVVQEMAKQYETVLHTNISTHAYSRLARYFDVKRNDPVLFSAFYKKILPEDNEEMRRVCSIINVDTVGGTKWWSTIPEWLKIQAKLEDFRLFPQPSHGLKHITYTSRGWHELLRRVDPKSITSIWSRIIDHRRELWSPWLNVDMKKFGCSLQTDGFSVSLSMNRIKKEPSMAQSPKRSKKSYDRIIAVDPGSRIPVAAVESRRLKFQRVTKKYVRSHTLEWKRARVRNKLCSVGEEAEKKDREKLNFPVSSKNITHVVEYTVFRMHWFNVRQEPYERHAKLTRLRLDKYIRTAKCEEKIIKEIFDDSSNTLVLYGAGSSFMNKASFSGRKFKHDSLIKRLRSKPNIEVEVVDEQYTSQACSSCNATTGEFHKIVMNHRLRWGVCPNCNSEFDRDSNAAKNILINFTRSTLCRPGCSTNGAS

SEQ ID NO: 4496 - protein, 556 aa, Euplexia lucipara
MAACKTCGGPDHTRTSSKKCKNYLPPIRKRHLSESKANQLEIYTVKRGLASCLCPLLTPEKKLDLLTEIRRGVRDLSRVYIELGVWYNYYMKMSTQLPPKPDVLNFIYAMKGKGPYADAYIKMFGERKFDDKLRTFVVQEMAKQYETVLHTNISTHAYSRLARYFDVKRNDPVLFSAFYKKILPEDNEEMRRVCSIINVDTVGGTKWWSTIPEWLKIQAKLEDFRLFPQPSHGLKHITYTSRGWHELLRRVDPKSITSIWSRIIDHRRELWSPWLNVDMKKFGCSLQTDGFSVSLSMNRIKKEPSMAQSPKRSKKSYDRIIAVDPGSRIPVAAVESRRLKFQRVTKKYVRSHTLEWKRARVRNKLCSVGEEAEKKAREKLNYPVSSKNITHVVEYTVFRMHWFNVRQEPYERHAKLTRLRLDKYIRTAKCEEKIIKEIFDDSSNTLVLYGAGSSFMNKASFSGRKFKHDSLIKRLRSKPNIEVEVVDEQYTSQACSSCNATTGEFHKIVINHRLRWGVCPNCNSEFDRDSNAAKNILINCTRSTLCRPGCSTNGAS

SEQ ID NO: 4497 - protein, 464 aa, Euplexia lucipara
MSTQLPPKPDVLNFIYAMKGKGPYADAYIKMFGERKFDDKLRTFVVQEMAKQYETVLHTNISTHAYSRLARYFDVKRNDPVLFSAFYKKILPEDNEEMRRVCSIINVDTVGGTKWWSTIPEWLKIQAKLEDFRLFPQPSHGLKHITYTSRGWHELLRRVDPKSITSIWSRIIDHRRELWSPWLNVDMKKFGCSLQTDGFSVSLSMNRIKKEPSMAQSPKRSKKSYDRIIAVDPGSRIPVAAVESRRLKFQRVTKKYVRSHTLEWKRARVRNKLCSVGEEAEKKAREKLNFPVSSKNITHVVEYTVFRMHWFNVRQEPYERHAKLTRLRLDKYIRTAKCEEKIIKEIFDDSSNTLVLYGAGSSFMNKASFSGRKFKHDSLIKRLRSKPNIEVEVVDEQYTSQACSSCNATTGEFHKIVMNHRLRWGVCPNCNSEFDRDSNAAKNILINYTRFTLCRPGCSTNGAS

SEQ ID NO: 4498 - protein, 602 aa, Macaria notata
MPCPTCGKDDHARSSSSKCLNRKRRIREADFDSDQKVSVYNVKKGLTSILCPLSDCKEAIVCTIRDDVREMSRLSIELSYLVNFFYKHYSTRHTTVPFPAKFDALQFTYALKGCKYKIDDPDNVISAYMSLRKNNNKLYDGRLRSFTIMQIAKQYSKILETNIQTHAFKRLKRYMYHKFGTDMDKSVVHSSTYDAYYNGMCKSDGIGEWFTYNKINCNEMKKNFWKFIPLFLKIQHELYENKKPSFNVFTIYSHRLKFITYDSRCIHELLRRVDSTNTPSQWSVFSENAVMYWNRHFTLPRKFGYSFSTDGVSVCLSMNRIVEKDQKSKSKKVKSLAVVDKGNDTKLNYSKVIAVDPGAKTPIVTCTRNGDDFSYKVLKREGVMYESKEYHRVRKRLRFIKDIEERIRMDRESVEKETGFEVTRKSKNADIYTTFQLKWFDEKQKIYEQRRLQRLKFDKYINDQKMLNKIVDEYFGKEPDTLVVYGAGFDFMNKGTFKGHRKFRHNEILKIIKQRKNLSVFVINEAFTTKNCSYCHDRDRAHRKLNVSKSPHRYVHCSVCRKGIHRDKNGAKNILLKFEKNKLPIRLSSVGTDMNFTSGGSS

SEQ ID NO: 4499 - protein, 597 aa, Catocala fraxini
MLCKSCGGTDHSRRSSKYCANYLPPIRQRSNSGSASEDFDVAVVKRGFDGVLCPLLDGDLRQRLIAAIREDVIEISRVYILLGVFVNHCWNAYPAESSSARTFQDVMNYVYALKGKGPHAHRFDEMVHNHRTTIEHYDGRLRTFIVQEMVKTYMTVLKTNITTHAYSRLARYFKVKRNDPTLFAAYYRKEFGDDEISKVCRTINVSSDWHSTVPMWLRIQREMYERGDASFTVFPQPRHGLKHVTYTTRGWHELLRRVAPDATPTNWATIEDHKRTLWAPYLDTKAVDMSKFGCCIQTDGVAVSLSMNRKRNQKPTKPSLLKTYTDFFEDRIVAVDPGSRVPVAACDSRTGFKRITKRWVRSHTLEWKRDRYRNRILRPVELAEAADRERIERERGVRLTRRNAEHVKLYTDFRLKWFAARQRPFEQVRKLTRLPFDKYINTARTNEKIVRETFLGDTPSDLLLVLYGAGVNFVNVACFSGRKFKHTDLLRRMRSRRNIEVRLVDEAYTSKACSACNERDGIYTPLHMNHRLRRGVCPDCNVEFDRDYNAAKNILVNHTRSAFCRPSSSCVSSVPSDQASHSPIRSTFVCAELEPGT

SEQ ID NO: 4500 - protein, 375 aa, Catocala fraxini
MYERGDASFTVFPQPRHGLKHVTYTTRGWHELLRRVAPDATPTNWATIEDHKRTLWAPYLDTKAVDMSKFGCCIQTDGVAVSLSMNRKRNQKPTKPSLLKTYTDFFEDRIVAVDPGSRVPVAACDSRTGFKRITKRWVRSHMLEWKRERYRNRILRPVELAVAADRERIERERSVRLMRRNAEHVKLYTDFRLKWFAARQRPFGQVRKLTRLPFDKYINTARTNEKIVMETFLGDTPSDRVLVLYGAGVNFVNVACFSGRKFKHTDLLRRMRSRRNIEVRLVDEAYTSKACSACNERDDIYTPLRMNHRLRRGVCPDCNVEFDRDYNAAKNILVNHTRSAFCRPSSSCVSSVPSDQASHSPIRSTFVCAEVEPGT

SEQ ID NO: 4501 - protein, 597 aa, Catocala fraxini
MLCKSCGGTDHSRRSSKYCANYLPPIRQRSNSGSASEDFDVAVVKRGFDGVLCPLLDGDLRQRLIAAIREDVIEISRVYILLGVFVNHCWNAYPAESSSARTFQDVMNYVYALKGKGPHAHRFDEMVHNHRTTIEHYDGRLRTFIVQEMVKTYMTVLKTNITTHAYSRLARYFKVKRNDPTLFAAYYRKEFGDDEISKVCRTINVSSDWHSTVPMWLRIQREMYERGDASFTVFPQPRHGLKHVTYTTRGWHELLRRVAPDATPTNWATIEDHKRTLWAPYLDTKAVDMSKFGCCIQTDGVAVSLSMNRKRNQKPTKPSLLKTYTDFFEDRIVAVDPGSRVPVAACDSRTGFKRITKRWVRSHTLEWKRDRYRNRILRPVELAEAADRERIERERGVRLTRRNAEHVKLYTDFRLKWFAARQRPFEQVRKLTRLPFDKYINTARTNEKIVRETFLGDTPSDRVLVLYGAGVNFVNVACFSGRKFKHTDLLRRMRSRRNIEVRLVDEAYTSKACSACNERDGIYTPLHMNHRLRRGVCPDCNVEFDRDYNAAKNILVNHTRSAFCRPSSSCVSSVPSDQASHSPIRSTFVCAELEPGT

SEQ ID NO: 4502 - protein, 597 aa, Catocala fraxini
MLCKSCGGTDHSRRSSKYCANYLPPIRQRSNSGSASEDFDVAVVKRGFDGVLCPLLDGDLRQRLIAAIREDVIEISRVYILLGVFVNHCWNAYPAESSSARTFQDVMNYVYALKGKGPHAHRFDEMVHNHRTTIEHYDGRLRTFIVQEMVKTYMTVLKTNITTHAYSRLARYFKVKRNDPTLFAAYYRKEFGDDEISKVCRTINVSSDWHSTVPMWLRIQREMYERGDASFTVFPQPRHGLKHVTYTTRGWHELLRRVAPDATPTNWATIEDHKRTLWAPYLDTKAVDMSKFGCCIQTDGVAVSLSMNRKRNQKPTKPSLLKTYTDFFEDRIVAVDPGSRVPVAACDSRTGFKRITKRWVRSHTLEWKRDRYRNRILRPVELAEAADRERIERERGVRLTRRNAEHVKLYTDFRLKWFAARQRPFEQVRKLTRLPFDKYINTARTNEKIVRKTFLGDTPSDRVLVLYGAGVNFVNVACFSGRKFKHTDLLRQMRSRRNIEVRLVDEAYTSKACSACNERDGIYTPLHMNHRLRRGVCPDCNVEFDRDYNAAKNILVNHTRSAFCRPSSSCVSSVPSDQASHSPIRSTFVCAELEPGT

SEQ ID NO: 4503 - protein, 258 aa, Andricus quercusramuli
MKEKEVTYAEKYNGNEDRWKMYFDFFEIGRSKKKGHFSRTISIDSIGASTNFNNPTRAQESKTTAAPPVRVIYKKFWGCDSSKKGLVAGVKRTRGPMPSKDEETKDKLFYPLYEKRCVAWLKWANHMYVQREIDEPVNYIIGDEKKAPCFVMLEEIQMSNRTKGHVATPIKLAEKRLGESTRVHGSGKFKFVCVNKVFTTHMSSRCVGQCSIVSKKRQRYFFCPKCRTTWERDINAGRNILSIGLITEGIMKKTDIRE

SEQ ID NO: 4504 - protein, 304 aa, Andricus quercusramuli
MVNEKVEKPIKESTRLDTEEFKNIDTYAAVNFTRVIKYRLANFVFKQPLYEKRYVARLNWEKYHMYVQREVDKLVNYIIGDVKKAPCFVVLGEVNMSNRTKGHVAPPIRLVKKHLVERAIVHGLGKLKVSCVDEHCTTQMCSNCVGKCIVLSKNRHRFAFCQNCRTTWERDINAGINILKIGLITEGILKKTDVPNPDNFNSLKSLSPGPSLEIDSGSGLLGIPPNKQKMRLKLYPVDGVEKSHFILLIFITIQRSPPKGITRAIKIYAPGQTIHSLLYHRSGQTVSFIENYMKQSDDYKARHS

SEQ ID NO: 4505 - protein, 250 aa, Andricus curvator
MVAGVVRTGDPMPFKDDKTRDKPFYVRRSSFRWPTLHQKQRKMVYEKVEKLIKESKKLDTEEFKNIDTYLAVNFRTVTKYRLADFFFKQPRYEKRCVACLKWEKYMYIQREVEELVNYIIGDVKKAPCFVVLGELNMSNRTKGHVATPVRLVKKHVVERAIVHGPGKLKVLFLRNTAPLKCAVTVLKMHCGLAKPVSVRLLPNCRTKWERGINAGRNILNIGLITEGILKKTDIPNPDNFNALKSLSPGP

SEQ ID NO: 4506 - protein, 570 aa, Apotomis betuletana
MVCKSCGGTDHQRRSSKLCKNHLAPIRKRGVEDELHDVEVYVVKRGLRSALCPLLDDLMTNRLLREIRSDVAELSRIYIKLGIFIDFYFKTVNCDASIKSFQDILNFVYALKGKGPYAEAYARMIEGHHVSSYDGRLRSYIVQELAKQYWTVLKTNLTTHAYSRLVRYFKVKRSDRRLNDAFFEKRYTSDEDELNAVCRVINVDSPWYTTIPEWLRIQEAMIKRGDASFIIFPQPSHGLKHVTYTSKGWHELLRRVDPTSTPSDWTKITDHRQELWAPYLDSKTIDMKKFGCTVQTDGCSVSISMSRRMITTKKENLKKFKASYDRTVAVDPGSRVPIAACDDRYGFKRITKKWIRSHTLEWKRDRVRKKLLEKSETDERLDRERIEKELEVVLTPKSSSGAAHYATFRLKWFEARQKPFETHSKLTRLKLDKYINVTRTNERIVREVFLRYTPSDRVLVLYGAGSKFMNRATFSGRKFGHDDLLKKLRAKRNITVETVNEAYTSKACSACNARDGSFHRLKIDHRLRRGVCPDCNGAPLDRDYNAARNILINHTRSTFCRPSFAKYGGA

SEQ ID NO: 4507 - protein, 390 aa, Apotomis betuletana
MTTHAYSRLVRYFKVKRSDRRLYDAFFEKRYTSDEDELNAVCRVINVDSPWYTTIPEWLRIQEAMIKRGDASFIIFPQPSHGLKHVTYTSRGWHELLRRVDPTSTPSDWTKITDHRQELWAPYLDSKTIDMKNFGCTVQTDASYDRTVAVDPGSRVPIAACDDRYGFKRITKKWIRSHTLEWKRDRVRKKLLEKSETDERLDRERIEKELEVVLTPKSSSGAAHYATFRLKWFEARQKPFETHSKLTRLKLDKYINVTRTNERIVREVFLRYTPSDRVLVLYGAGSKFMNRATFSGRKFRHDDLLKKLRAKRNITVETVNEVYMSKACSACNARDGSFHRLKIDHRLRRGVCPDCNGAPLDRDYKAARNILINHTRSTFCRPSFTKYGGA

SEQ ID NO: 4508 - protein, 430 aa, Apotomis betuletana
MSFSVYPASIEKVTTNLTTHAYSRLVRYFKVKRSDRRLYDAFFEKRYTSDEDELNAVCRVINVDSPWYTTIPEWLRIQEAMIKRGDASFIIFPQPSHGLKHVTYTSRGWHELLRRVDPTSTPSDWTKITDHRQELWAPYLDSKTIDMKNFGCNVQTDGCSVSISMSRRMITTKKEKLKKFKASYDRTVAVDPGSRVPIAACDDRYGFKRITKKWIRSHTLEWKRDRVRKKLLEKSETDERLDRERIQKELEVVLTPKSSSGAAHYATFRLKWFEARQKPFETHSKLTRLKLDKYINVTRTNERIVREVFLRYTPSDRVLVLYGAGSKFMNRATFSGRKFRHDDLLKKLRAKRNITVETVNEAYTSQACSACNARDGSFHRLKIDHRLRRGVCPDCNGAPLDRDYNAARNILINHTRSTFCRPSFAKYGGA

SEQ ID NO: 4509 - protein, 570 aa, Apotomis betuletana
MVCKSCDGTDHQRRSSKLCKNHLAPIRKRGVEDELHDVEVYVVKRGLRSALCPLLDDLMTNRLLREIRSDVAELSRIYLKLGIFIDFYFKTVNCDASIKSFQDMLNFVYALKGKGPYAEAYARMIEGHHVSSYDGRLRTYTVQELAKQYWTVLKTNLTTHAYSRLVRYFKVKRSDRRLNDAFFEKRYTSDEDELNAVCRVINVDSPWYTTIPEWLRIQEAMIKRGDASFIIFPQPSHGLKHVTYTSRGWHELLRRVDPTSTPSDWTKITDHRQELWAPYLDSKTIDMKKFGCTVQTDGCSVSISMSRRMITTKKEKLKKFKASYDRTVAVDPGSRVPIAACDDRYGFKRITKKWIRSHTLEWKRDRVRKKLLEKSETDERLDRERIQKELEVVLTPKSSSGAAHYATFRLKWFEARQKPFETHSKLTRLKLDKYINVTRTNERIVREVFLRYTPSDRVLVLYGAGSKFMNRATFSGRKFRHDDLLKKLRAKRNITVETVNEAYTSKACSACNARDGSFHRLKIDHRLRRGVCPDCNGAPLDRDYNAARNILINHTRSTFCRPSFTKYGGA

SEQ ID NO: 4510 - protein, 287 aa, Apotomis betuletana
MSKFRLSTIQTDGCSVSLSMTRVVKKSQINSSAKKSKQRTSTVTVDPGRRVPIAACDERYGFKRVTKKWVRSHTREWKRERVRNKLLYDSETAERLDRERVERELEICVTNKRSLYVNWYAYYRLKWFELRQKLFETHSKLTRLKFDKYINIARTNERIVREIFLADAPSDSSTRLVLYGAGSKFMNRATFSGRKFRHDDLLKRLRARRNITVETVDEHYTSKACSACNARDGSYHRLKIDPKLRRGVCPDCNGASLDRDYNAARNILINHTRSTVCRPCSVTNAGA

SEQ ID NO: 4511 - protein, 267 aa, Diarsia rubi
MSMNRAVVVNNQQTIKKRAKPTYDRIVAVDPGSRVPVAAVDSKMYRFQRITKKYVRSHTLEWKRERVRNKLIKSIEEAEQKERETFKFPVSSKNTSHVMEYTLFRMKWFDARQSVYELHSKLTRLKLDKYIRTAQCEERIIKQVFDGGGGGVERVLVLYGAGSKFMNSATFSGRKFKHDSLIRRLRSKKNINVEIVDESYTSQACSSCNEKTGAFKKIIMNHKLRWGICPNCHKEFDRDANAAKNILINYKRSTICGPGCVEMIHAS

SEQ ID NO: 4512 - protein, 1637 aa, Diarsia rubi
MDTQQAVVDQIVQNLAFDVEAIPKNKSIQTTSISKSAPLNLKIKVRKKDEIQKHNDVLWVANDTSETAQKVRLVNSGHNIMAFDVFMEAEFEKKARKPHKHFFDMLRPGKCLRAVDDDKCPYMPSSSYSANITEPTKATKSDGTFKQTCILSKNVYQDYSVLTQQAEPKWLFGKCKPGGCLDPPFSEDKYSYKPSTKSGPEREEENLLDEQIVRSDVCNKQPVITQDDETESNERHSSIFEKGVFKKKRRSKDKSTNAQLPDKTDSIVDIYQGKSVTNSSSTRSNSIITYPPKTKSIPRLSDDKTGESRDPSEVKPRMSFNDHSEPCFIPPKGVLRIKEKDTSDPSDNPKHESSDVTEHPVNESFKMPVPLPIPVPIPISIIYRTQKPKDIDINDDLLTTEGDNANVTVYKLTKQESQEQEKDSTTPQLKREKSATADVADKPLDSSKTESFSCNVEQPTAPNELGDKNIKEPFKEIYSENNMKDTGFPNKDEKIYSPIPILAPISLNVSDSTKGGFSDQENDTVTKPPVIAEMQEKRNSKLEEITESMDKPTKQNDIKDDDTVDKKDEIKPAIIAEAQEKRNSKLEEITESMNKPTIQNDIKDDNTVDKKNETKPLIIVESQEKRNSKLEEITESMDKSTKQNNIKDGDTVNKTDEPKKGERKDSQRLSQSKLPNLKDKGVTKRRDNPYKNFDTFEDSGTDIGSLLSESKTSIVSAKGNEDKKRSVSPGKSLDNIGGRDTDLGVRTDKKRTSLPSGLMHKSDSGNGKITESVNNSNIDSYTKSEPEFPNADNVNFIVGPIIIDNIKPSPKSLKVKEVDSVSNIQAEPVERKYDPPPELIPPTPAQKHTERISSTDKRIDTGLPSIQSTSTLKSAMKKDAITVDLGFHSYINDKNERILRTFDAANSPKRLSNDSVTVIKTQMRISSNGIRIPVDSENDMYIQIKKSNANQRVSTSESGLVSDIGSRGKKQKSPSLCNAFTQLRVCWGRLTVYPDAAEYQYFTWSDCLSDLHNPVNIRSSDLLTKIKTFKLYALNVTKSAKQKKTIVQWRGERDGEMRSSERIVEEKKDSTIEMDAMDDHFIIDYYEQELVPLQLIIKELRNEIDVLAEQQVLFKDKFACPKQTRLVHANKKCYECLSHTSASVFIYIMPTITTCGCKTCGGLDHIRISSKLCKNHLPSVRKRNLIDATAKIEIYNIKRGLVSMLCPLLEEERKLRLLNEIRRDVKDLSRVYIELGIWINYYIKTTSSFPEKPDILNFIYAMKGKGPYVDSYQQCFGASRIYDGRLRTFVVQEMAKQYETVLHTNISTHAYSRLARYFKVKRNNQDLFNAFYKKIFPSNNEEITRVCSIINVDSVKGSKWWNTIPEWLKIQETLQDFKLFPQPSHGLKHITYTSRGWHELIRRVDPTAISSYWTKINNHMRELWTPWLDVNTKKFGCTIQTDGISVSMSMNRAVVVNKKQTTIKRAKPTYDRIMAVDPGSRVPVAVVESKMYKFQRITKKYVRSHTLEWKRERVRNKFTKSIEEAEQKERESFKFPVSSKNTSHVMEYTLFRMKWFEARQSPYELHSKLTRLKLDKYIRTAQCEERIIKQVFDGGGGGVGVERILVLYGAGSKFMNSATFSGRKFKHDSLIRRKIKE

SEQ ID NO: 4513 - protein, 292 aa, Diarsia rubi
MSTILPVSWLDVNTKKFGCTIQTDGISVSMSMNRAVVVNKKQTTIKRAKPTYDRIMAVDPGSRVPVAVVESKIYKFQRITKKYVRSHTLEWKRERVRNKFTKSIEEAEQKERESFKFPVSSKNTSHVMEYTLFRMKWFEARQSPYELHSKLTRLKLDKYIRTAQCEERIIKQVFDEGGGGVGVERILVLYGAGSKFMNSATFSGRKFKHDSLIRRLRSKNNIDVEIVDESYTSQACSSCNEKTGAFKKIIMNHKLRWGICPNCHKEFDRDANAAKNILINYKRSTICGPGCV

SEQ ID NO: 4514 - protein, 562 aa, Diarsia rubi
MPTITTCGCKTCGGLDHIRISSKLCKNHLPSVRKRNLIDATAKIEIYNIKRGLVSMLCPLLEEERKLRLLNEIRRDVKDLSRVYIELGIWINYYIKTTSSFPEKPDILNFIYAMKGKGPYVDSYQQCFGASRIYDGRLRTFVVQEMAKQYETVLHTNISTHAYSRLARYFKVKRNNQDLFNAFYKKIFPSNNEEITRVCSIINVDSVKGSKWWNTIPEWLKIQETLQDFKLFPQPSHGLKHITYTSRGWHELIRRVDPTAISSYWTKINNHMRELWTPWLDVNTKIFGCTIQTDGISVSMSMNRAVVVNKKQTTIKRAKPTYDRIMAVDPGSRVPVAVVESKMYKFQRITKKYVRSHTLEWKRERVRNKFTKSIEEAEQKERESFKFPVSSKNTSHVMEYTLFRMKWFEARQSPYELHSKLTRLKLDKYIRTAQCEERIIKQVFDGGGGGVGVERILVLYGAGSKFMNSATFSGRKFKHDSLIRRLRSKNNIDVEIVDESYTSQACSSCNEKTGAFKKIIMNHKLRWGICPNCHKEFDRDANAAKNILINYKRSTICGPGCV

SEQ ID NO: 4515 - protein, 263 aa, Diarsia rubi
MSMNRAVVVNKKQTTIKRAKPTYDRIMAVDPGSRVPVAVVESKMFKFQRITKKYVRSHTLEWKRERVRNKFTKSIEEAEQKERESFKFPVSSKNTSHVMEYTLFRMKWFEARQSPYELHSKLTRLKLDKYIRTAQCEERIIKQVVDGGGGGVGVERILVLYGAGSKFMNSATFSGRKFKHDSLIRRLRSKNNIDVEIVDESYTSQACSSCNEKTGAFKKIIMNHKLRWGICPNCHKEFDRDANAAKNILINYKRSTICGPGCV

SEQ ID NO: 4516 - protein, 369 aa, Epinotia nisella
MQQELTEHNVKSFNVFPIYSHGLKYISYDSRCLHELLRRIDPKNTPSTWSEFSIDTKKYWNRWFNIPKNFGYSFSTDGVCVSLSMNRIIEKKDKFKSKRVKTDEVKVFNNEQLNRPYKRIIAVDPGAKTPIVTCTRNGNDSFNYKILKKQRVMYETKEHSREKKRLKYVKDIDERIKHDRELLNNKLGYEISRKNKHIHEYMQFQLKWFDEKQKLYEQRRVQRLKFDKFINDQVTNNKIVDEYFGKEPETLVVYGSGFDFMNKCSFKGHRKFRHNDIIKIIKQRKNLSLYIINEAFTTKNCSKCYESKKQNILQVSKSPHRYVYCSICRKGIHRDKNGAKNILLKYEYKLPSILSFTGTDMDITQGPLS

SEQ ID NO: 4517 - protein, 327 aa, Epinotia nisella
MKVHSFRLFPQPSHGLKHVTYTSRGWHELLRRVAPETVPSEWPNITDHIRQLWAPWLNLPSKFGCCLQTDGVSVSVSMNRIVREKPPPNKRTRFQYDRIVAVDPGSRVPIASVESKMLAYKRITKKYVRSHTLEWKRERVRNKILNPILDAMQQERSSFSFPVSSKNTDHVIEYTAFRIKWFEAMQIPYEQYSKLTRFGLDKYMRSAQCQERIVKDVFDGGGIEKVLVLYGAGSKFMNRASFSGRKFKHDSLLKRLRAKANIHVEIVEESYTSQACSTCKERTGEFVKIGMDRRLRWGTCPVCHSEFDRDENAAKNILINHTRSTIL

SEQ ID NO: 4518 - protein, 249 aa, Epinotia nisella
MNRILKEKPHTIPSKRAKIHHDRIVAVDSGSRVPLATVESHRHAFKRITGKYVRSHTLEWKRERVRRKLLTPVLDAMQRERSKFTFPVSSKNTQHVIEYTKFRVKWFDAMQVPYEQNPKLTRHGLDKYMRTARCEERITREVFDGGGVENVLVLYGAGSKFMNTALFSGRKFKHDSLLRRLRSKRNITVEVVDEAHTSQACSSCNQKTGEFCKMCHSEFDRDANAAKNILINHIRSTICRPICPKNGIS

SEQ ID NO: 4519 - protein, 476 aa, Epinotia nisella
MKTCGTTLPAKPDVLRFIYAMKGKGPYADAYNKLFGVRKYDGKLRTFIVQELAKQYETTLHTNISTHAYSRLARYFQVKRNDKRLYNAFYKKMLPDGDDDISREIASVCATVNVDSVKGTMWWSTVPEWMRIQDCMKVNSFRLFPQPSHGLKHITYSSRGWHELLRRVAPATITSEWSKITDHLRQLWAPWLDLSANTKFGCRLQPDGISVSMSMNRILKEKPHTIPSKWAKIHHDRIVAVDPGSRVPLSTVESHRHAFKRITRKYVRSHTLEWKRERVRRKLLTPVLDAMQRERSKFTFPVSSKNTQHVIEYTKFRVKWFDAMQVPYEQNPKLTRHGLDKYMRTARCEDRIAREVFDGGGVENVLVLYGAGSKFMNTALFSGRKFKHDSLLRRLRSKRNITVEVVDEAYTSQACSSCNQKTGEFCKIGMNHRLRWGVCPTCHSEFDRDANAAINILINHIRSTICRPRCPKNGIS

SEQ ID NO: 4520 - protein, 378 aa, Epinotia nisella
MPEDNAEIARVCAIINVDTVKGTRWWSTISEWMRIQDAMKVHSFRLFPQPSHGLKHVTYTSSGWHELLRRVAPETVPSEWPNITDHIRQLWAPWLDLPSKFGCCLQTDGVSVSVSMNRIVREKPPPNKRTRFQYDRIVAVDPGSRVPIASVESKMLAYKRITKKYVRSHTLEWKRERVRNKILNPILDAMQQERSSFSFPVSSKNTDHVIEYTAFRIKWFEAMQIPYEQYSKLTRFGLDKYMRSVQCQERIVKDVFDGGGIEKVLVLYGAGSKFMNRASFSGRKFKHDSLLKRLRAKANIHVEIVEESYTSQACSTCNERTGEFVKIGMDRRLRWGTCPVCHSEFDRDENAAKNILINHTRSTICRPRYPPRKDIVTS

SEQ ID NO: 4521 - protein, 558 aa, Epinotia nisella
MVGCKSCGGSDHQRRSSVKCGNYLPPIRKRNLENSQNFEVYVVKRGLNSLLCPLLAVQQRARLLEEIRRDVRDLSRLYIELGIFYNMYMKTTDTIPSKPDVLNFIYAMKGKGPYAATYTKYFGGRKYDGKLRSYTVQEMAKQYETTMHTNVATHAYSRLARYLQVKRNDERLYNAFFKKVMPEDNAEIARVCAIINVDTVKGTRWWSTISEWMRIQDAMKVHSFRLFPQPSHGLKHVTYTSRGWHELLRRVAPETVPSEWPNITDHIRQLWAPWLNLPSKFGCCLQTDGVSVSVSMNRIVREKPPPNKRTRFQYDRIVAVDPGSRVPIASVESKMLAYKRITKKYVRSHTLEWKRERVRNKILNPILDAMQQERSSFSFPVSSKNTDHVIEYTDFRIKWFEAMQIPYEQYSKLTRFGLDKYMRSAQCQERIVKDVFDGGGIEKVLVLYGAGSKFMNRASFSGRKFKHDSLLKRLRAKANIHVEIVEESYTSQACSTCNERTGEFVKIGMDRRLRWGTCPVCHSEFDRDENAAKNILINHTRSTICRPRYPPRKDIVTS

SEQ ID NO: 4522 - protein, 526 aa, Epinotia nisella
MYKFTSSNEDYVRACAPCCLSSSVPVFWRKLNATYETCPGSTLGIFYNAYMKTCGTTLPAKPDVLRFIYAMKGKGPYADAYNKLFGVRKYDGKLRTFIVQEIAKQYETTLHTNISTHAYSRLARYFQMKRNDKRLYNAFYKKMLPDGDDDISREIASVCATVNVDSVKGTMWWSTVPEWMRIQDCMKVNSFRLFPQPSHGLKHITYSSRGWHELLRRVAPATITSEWSKITDHLRQLWAPWLDLSANTKFGCRLQTDGISVSMSMNRILKEKPHTIPSKRAKIHHDRIVAVDPGSRVPLATVESHRHAFKRITRKYVRSHTLEWKRERVRRKLLTPVLDAMQRERSKFTFPVSSKNTQHVIEYTKFRVKWFDAMQVPYEQNPKLTRHGLDKYMRTARCEERITREVFDGGGVENVLVLYGAGSKFMNTAVFSGRKFKHDSLLRRLRSKRNITVEVVDEAYTSQACSSCNQKTGEFCKIGMNHRLRWGVCPTCHSEFDRDANAAKNILINHIRSAICRPRCPKNGIS

SEQ ID NO: 4523 - protein, 369 aa, Epinotia nisella
MQQELTEHNVKSFNVFPIYSHGLKYISYDSRCLHELLRRIDPKNTPSTWSEFSIDTKKYWNRWFNIPKNLGYSFSTDGVCVSLSMNRIIEKKDKFKSKRVKTDEVKVFNNEQLNRPCKRIIAVDPGAKTPIVTCTRNGNDSFNYKILKKQRVMYETKEHSREKKRLKYVKDIDERIKHDRELLNNKLGYEISRKNKHIHEYMQFQLKWFDEKQKLYEQRRVQRLKFDKFINDQVTNNKIVDEYFGKEPETLVVYGSGFDFMNKCSFKGHRKFRHNDIIKIIKQRKNLSLYIINEAFTTKNCSKCYESKKQNILQVSKSPHRYVYCSICRKGIHRDKNGAKNILLKYEYKLPSILSFTGTDMDITQGPLS

SEQ ID NO: 4524 - protein, 706 aa, Diachrysia chrysitis
MAFTIIPNYNIKVVINHTNASCTITEYQNKDIIVYLLSDFTNNNSPLSDKSVVAQLYPGVITNLIFPQDVLNLNQCLQVWMCDEASVERGKMYNVKLTKVRLNYHTYKDDFVWAQQYAFVVENPEHARKIYKGSPIFLNNWLVSLVTTFEHDPITGATVFIVTGGQFGKFTVGNVKFNGKVSFEKLLDTHTVCRGKKKTAVAEEEYFSLRPKAPQKYDGKHRSFLITSMAKDYETALKNAVCVHAESRIARYLAAAVQSSDCKLKLYQWKRIVYEELIRGRGPIREEIHELREEFGGAFDLEKNWWKYVPIFYKIGRYLHEKNLKSFNLFPVYAPGVKHVRYDAMGLYELLASCNKISRIKAVDFRAATPLYWSMYFKLDKYLDADARVRWCNDKTFGMSITTNGVDVSISMQRRRRRKLQKAKKPRPMEEKEEFTRILGVDPGLVQFIGGCLIDRDAETETNILVRGKSFNNASVCRWRRVRKIYEIDKAFKESCAGGIDGYSSKIGYGNLSIYTRLTLAFMRERQRSYEQRIRKRWDEKICKRRALDRLVDSLLSRSRRTLVCFGDGGGAGQKNIKYGHARPPKRALESAFARRRRDCRLVAAVDEYNTTKRCAKCCGVLKTAQSPHRYQICPNCNVVWNRDVNAARNIALIGTFAADVIPNVFLRQQRNDDNNVATQCVGWPEFESHLYVRSKFVSLEARCSV

SEQ ID NO: 4525 - protein, 559 aa, Diachrysia chrysitis
MENDLGGCRKTRPPPLDAQALVPPNWQPHMVFIAPTPEPRSEPLWRLGKKKTAVAEEEYFSLRPKAPQKYDGKHRSFLITSMAKDYETALKNAVCVHAESRIARYLAAAVQSSDCKLKLYQWKRIVYEELIRGRGPIREEIHELREEFGGAFDLEKNWWKYVPIFYKIGRYLHEKNLKSFNLFPVYAPGVKHVRYDAMGLYELLASCNKISRIKAVDFRAATPLYWSMYFKLDKYLDADARVRWCNDKTFGMSITTNGVDVSISMQRRRRRKLQKAKKPRPMEEKEEFTRILGVDPGLVQFIGGCLIDRDAETETNILVRGKSFNNASVCRWRRVRKIYEIDKAFKESCAGGIDGYSSKIGYGNLSIYTRLTLAFMRERQRSYEQRIRKRWDEKICKRRALDRLVDSLLSRSRRTLVCFGDGGGAGQKNIKYGHARPPKRALESAFARRRRDCRLVAAVDEYNTTKRCAKCCGVLKTAQSPHRYQICPNCNVVWNRDVNAARNIALIGTFAADVIPNVFLRQQRNDDNNVATQCVGWPEFESHLYVRSKFVSLEARCSV

SEQ ID NO: 4526 - protein, 634 aa, Diachrysia chrysitis
MGCCAACGGTDHTRRSSVKCKQHIPPQRKRFAPQESQQTLYDYETYTIKRGLRKFCKDAEIIAKIKEDARQVSALAVESSIYLHHHYTRLLESQSAVAWPDKYNVLYFFYRLQGKKKTAVAGGEEEEYFSLRPKAPRQYDGKHRSFLITSMAKDYETALKNAVCVHAESRIARYLAAAVQSSDCKLKLYQWKRIVYEELIRGRGPIREEIHALREEFGRAAATFDLEKNWWKYVPIFYKIGRYLHEKNLKSFNLFPVYAPGVKHVRYDAMGLYELLASCNKISRIKAVDFRAATPLYWSMYFKLDKYLDADARVRWCNDKTFGMSITTNGVDVSISMQRRRRRRKPQTAKKPRPLEEKEEFTRILGVDPGLVQFIGGCLIDRDAETETNILVRGKSFNNASVCRWRRVRKIYEIDKAFKDSCAAAIDGYSSKIGYGNLSIYTRMTLAFMHDRQRSYEQRIRKRWDEKICKRRALDRLVDSLLSRSRRTLVCFGDGGGAGQKNIKYGHARPPKRALESAFARRRRDCRLVAAVDEYNTTKICSKCCGVLKTSRSPHRYQICPNCNVVWNRDVNAARNIALAGLFPDAKPDVFLRQEQQRNDDDDDVATQRVGWPEFESHAYVRSKFVSLEAKCWV

SEQ ID NO: 4527 - protein, 625 aa, Diachrysia chrysitis
MGCCAACGGTDHTRRSSVKCKQHIPPQRKRFAPQESQQTLYDYETYTIKRGLRKFCKDAEIIAKIKEDARQVSALAVESSIYLHHHYTRLLEQESTAAWPDKYNVLYFFYRLQGKKKTAVAEEEYFSLRPKAPQKYDGKHRSFLITSMAKDYETALKNAVCVHAESRIARYLAAAVQSSDCKLKLYQWKRIVYEELIRGRGPIREEIHALREEFGGGVAFDLDKNWWKYVPVFYKIGCYLHEKNLKSFNLFPVYAPGVKHVRYDAMGLYELLASCNKISRIKAVDFRAATPLYWSMYFKLDKYLDADARVRWCNDKTFGMSITTNGVDVSISMQRRRRRRKLQTPKKPRILEEREEFTRILGVDPGLVQFIGGCLIDRDAETETNILVRGKSFNNASVCRWRRVRKIYEIDKAFKDSCAAAAIDGYSSKVGYGNLSVYTRMTLAFMHDRQRSYEQRIRKRWDEKICKRRALDRLVDSLLSRSRRTLVCFGDGGGGGAGQKYGHAKPPKRALESAFARRRKDCRLVAAVDEYNTTKICAKCCGVLKTSRSPHRYQICPNCNVVWNRDVNAARNIALAGLFADAKPDVFLRQQRNDDVATQRVGWPEFESHTYVRSKFVSLEARCWV

SEQ ID NO: 4528 - protein, 477 aa, Diachrysia chrysitis
MKTKSVGNHVTLLYAESRIARYLAAAVQSSDCKLKLYQWKRIVYEELIRGRGPIREEIHALREEFGRAAATFDLEKNWWKYVPIFYKIGRYLHEKNLKSFNLFPVYAPGVKHVRYDAMGLYELLASCNKISRIKAVDFRAATPLYWSMYFKLDKYLDADARVRWCNDKTFGMSITTNGVDVSISMQRRRRRRKPQTAKKPRPLEEKEEFTRILGVDPGLVQFIGGCLIDRDAETETNILVRGKSFNNASVCRWRRVRKIYEIDKAFKDSCAAAIDGYSSKIGYGNLSIYTRMTLAFMHDRQRSYEQRIRKRWDEKICKRQALDRLVDSLLSRSRRTLVCFGDGGGAGQKNIKYGHARPPKRALESAFARRRRDCRLVAAVDEYNTTKRCAKCCGVLKTSRSPHRYQICPNCNVVWNRDVNAARNIALAGLFADAKPDVFLRQERNNDVATQRVGWPEFESHTYVRSKFVSLEARCWV

SEQ ID NO: 4529 - protein, 484 aa, Diachrysia chrysitis
MAKDYETALKNAVCVHAESRIARYLAAAVQSSDCKLKLYQWKRIVYEELIRGRGPIREEIHALREEFGRAAATFDLEKNWWKYVPIFYKIGRYLHEKNLKSFNLFPVYAPGVKHVRYDAMGLYELLASCNKISRIKAVDFRAATPLYWSMYFKLDKYLDADARVRWCNDKTFGMSITTNGVDVSISMQRRRRRRKPQTAKKPRPLEEKEEFTRILGVDPGLVQFIGGCLIDRDAETETNILVRGKSFNNASVCRWRRVRKIYEIDKAFKDSCAAAIDGYSSKIGYGNLSIYTRMTLAFMHDRQRSYEQRIRKRWDEKICKRRALDRLVDSLLSRSRRTLVCFGDGGGAGQKNIKYGHARPPKRALESAFARRRRDCRLVAAVDEYNTTKICSKCCGVLKTSRSPHRYQICPNCNVVWNRDVNAARNIALAGLFPDAKPDVFLRQEQQRNDDDDDVATQRVGWPEFESHAYVRSKFVSLEAKCWV

SEQ ID NO: 4530 - protein, 541 aa, Chlamydomonas reinhardtii
MLQEACALVSTSTRPQQRESVMAHFYAMHFAPLLVEAACGPPVDITAHHQLAHHLLQDVLTNLEQHYCANFMRWVRKWSRAVLEVPDEQLPPAPAADDDDEEEEDDDNEEEEVRSGTGMGSKADAGARVFKALASLMTAALMGWRELPLTEGDMGGLAVPAGLLDRANVKATALVQTWKARGLHPVQAGQQRLLDRDPLLLVSAAADLLRDILPRHRWLVSEYRRLRTAALPPPRGELVKAKFAARRTKPFSLVVEASLMPLHVPITNTVLQEVLINREVLVVAWEAAAAAERDNGQTGRRLWLQARLKEQPALKRCQAGIPSARVASAADHERRIRYLYSGGGVDAAAAAGSAPAPVQQYGLWHLLRFYRQWGQRRWRLTVHVRTQKVLEHTAQQLAGGRPKEEVIVGWGNANTGYGGCISRLGRGPNRALLRLLVDKYAHLVVYVDEFYTSQGRDVNSATNIRHALVEMLLGHKRPASLQTGGGGGGGGGSGGGGGSGGGGGSGSGGGACAHLGSGGGGKGHVEEESAAPPKKRRKRAG

SEQ ID NO: 4531 - protein, 200 aa, Chlamydomonas reinhardtii
MFCNKVGVHLSEGPAEAAGPAEAGPRGAVHVLWHYHFSAFRRRRWAAFIQRDRALHRAAKQLTGGRAKEEVVVGWGSWAFQGGKGGSPISVRGGRAPTGRLIKLLRERYAKHVFIIDEYKTSKTCYNCGCQEMAIKRLGGLKEGQRPWSVKVCNDCLTTWNRDVSAANVIRVLLLLKLMGFERPTKLQRPPWPPPAAGPG

SEQ ID NO: 4532 - protein, 287 aa, Chlamydomonas reinhardtii
MLLLSNKRSAQDRAANRVMRALTHGLPKERPLVIGVGSASFSPTAGGGALAAPNTAMREALSRVAQRERQATGRSVKIVPVWEHRTTLCCSTCGAETQGAWVRRNGVLRRSGRIRYCTECGTSRDRDVQGARNMLRIVEDEYDGRGRPLYLCRQEHLPKPPPMAPAVPLAVIDALSALQAEGDVAARRAAQAVAAAMEQQVVEASGGNSLVGEPQLQAIDARLAAGPPAEVMDAASGRPRGTVAVIDALSALQAEGDVAAQRAAQAVAAAMEQQVVEASGGDSLVGA

SEQ ID NO: 4533 - protein, 232 aa, Chlamydomonas reinhardtii
MNAMTRLRSAALQAYVGGIPTAATASAARFEERLRYLFASGAAGQAAGQEAGQAEAAGQAEAAGPAEAGPRGAVHVLWHYHFSAFRRKRWAAFIQRDRALHRVAKQLTGGRPKEEVVVGWGSWAFQGGKGGSPISVRGGRAAKHVFIIDEYKTSKTCYNCGCHEMAIKRLGGLKEGQRPGSVKVCNVCLTTWNRDVSAANVIRVLLLLKLMGFEQPTKLQRPPWPPAAAGPG

SEQ ID NO: 4534 - protein, 570 aa, Chlamydomonas reinhardtii
MSTPPKLQMSDFPQELFDEIEKKIETKIEKKIERMIDKKIEAKVREELQKQLPRGLVQLLWESPRGNAPLLFGLSAVLLLMPAVKRFVVPAVKRWVRKWSRAVLEVQLPPALAADDDDDDEEEDDDDEEEEVRSGPGMGSKADAGARVFKALASLMTAALMGWRELPHTEGDMGGLAVPAGLLDRANVKATALVQTWKAPGLHPDQAGQQRLLDRDPLLLVSAAADLLRDILPRHRWLVSEDRRLRTAAPPPPRGELVKAKFAARRTKPFSLVVEASLMPLHVPITNTVLQEVLINREVLVVAWEAAAAAERDNGQTGRQLWQQARLKEQPALKRCQAGIPSAQVASAADHELRIRYLYSGGGVDAAAAAGSAPAPVQQYGLWHLLRFYRQWGQRQSRLTVHVRTQKVLEHTAQQLAGGRPKEEVIVGWGNANTGYGGCISRLGRGPNRALLRLLVDKYAHLVVYVDEFYTSQGRDVNSATNIRHALVEMLLGHKRPSSLQTGGGSGGGGGGSGSGGGGSGSGSGGSGSGGGGSGSGGGACAHLGSGGGGKGHEEEESAAPPKKRRKRAG

SEQ ID NO: 4535 - protein, 235 aa, Chlamydomonas reinhardtii
MAAPGDNPVPGVVAAGDPLAVFELATLSTMRIVGVDPGVGNYLVACQTGRRLWQQARLEEQPALKRCQAGIPSARVASAAEHELRIRHLYSGGGVDAAAAAGSAPAPVQQYGLWHLLRFYRQWGQRRWRLTVHVRTQKVLEHTAQQLAGRRPKEEVIVGWGNANTGYGGCISRCVRSAGGAYSATGSAACRLAAAAAAAAAGVRARILVAEGAGKATHVEEESAAPPKKRRKRAG

SEQ ID NO: 4536 - protein, 537 aa, Chlamydomonas reinhardtii
MDSVGCEAELQDQLLWCFLNPLQIAASKSFVCGRMRRDVEGLPANSGRPDFLLLSGDRNTVLVAVEVKTSAALWVPPGRSLPDVYAEAGKNSKIVKAVHQLYSYLDRVPYGVLLTDKQLFCMRREHDELLCSPSIPLTAEQGEAAAGGFGAGSLTAAAALYCTLRWSQAWCTSSQLFPGYRPDPQVPGHTPRRLAESSSAVVLQGELGGRAAAVKMVDLWQGSEGKKLLQHEARMYQALQPLQGSYVPRLLGYGSCDGWQFFVATSLEGPSLNLEDGWALGEAATRAGALAALDAVHACGVLHGDIALRNFALAASHSPPLGMGGGGAAGGAGGEGGSAGQQQPCVMLLDFGHAQLVTTAAEKFGEEPAELFRRERQELQQLLGSEVRTAILGNGCAVALHRVAKQLTGGRPKEEVVVGWGSWAFQGGKGGSPISVRGGRAPTGRLIKLLRECYAKHVFIIDEYKTSKEMAIKRLGGLKEGQRPWSVKVCNDCLTTWNRDVSAANVIRVLLLLKLMGFERPTKLQRPPWPPAAAGPG

SEQ ID NO: 4537 - protein, 604 aa, Chlamydomonas reinhardtii
MTADTTSRSVEAARSHASFFLVRAQPPVDAFGPGLEARRDQLGAQVQQLTQAQPLTREDTQRLASLRRELHRARPFTLTPSPSFAPIYVPLDNTSMARLPGLLPTLARRHGEVFAGAGAGAVAPSSFVQAAFGGGGMQSSATLNAVGWGLFQLGGVTSRNAPFANYITTDGVACSVAREAHNKPLANLKPATAPADAGELCTLEEMKATQIIGVDPCGGGNWFMAARSPLYQPGPWAWEGVGPAQRYLLELHDKQLDEELFPGQLPPEPRRRRKGGGRKGGGRTGGHRRKQSKHWQPRARTARRRRQKRGRFHMSMGHWRHMSGLERLQPNRPQLAPALQAYTGGIPTAATASAARFEERLRYLFASGAAGQAAGQAAGQAAGQAAGQAAGQAAGQAAGQAAGQAAGQAAGQAAGQAAGQAAGQAEAGPRGAVHVLWHYHFSAFRRKRWAAFIQRDRALHRVAKQLTGGRPKEEVVVGWGSWAFQGGKGGSPISVRGGRAPTGRLIKLLRERYAKHVFIIDEYKTSKTCYNCGCQEMAIKRLGGLKEGQRPWSVKVCNDCLTTWNRDVSAANVIRVLLLLKLMGFERPIKLQRPPWPPAAAGPG

SEQ ID NO: 4538 - protein, 1876 aa, Chlamydomonas reinhardtii
MAGSSDSTDAEPVAGWFLSVLFLLFMGISIAWQIFIALITFLNSFYGGAKTIWLTRLKEEVLDVGVISLVLVFVYPYIAGICVDSTSTSSYPASGSKYPLPPSAVPAADAPPSLPRALLAAGARALLDGSLGHDGHMDPGRGYAAAGEALLTDGLGPGPGAGAGAGVGVGAGVGVGGRRGLAEQLVSGLAVAVRRGLAGGGSAAACPEGQQHLFPAGSISNAHYLLFFVALVHIVYSLFTFTLTLQRFTFWSKWERRARLEAMDAAEVLESPDPPTWYCRPFVHGLRYLQGGIDRDRYMVLRGLFQLRSRAHRVKAFVDNLHYTNVCENAMEIDIAKMVAHGWLQALIVAIFTLYPTVVYQILWIGGASILVQVIVVAKMESVVSKVLRIVRVAGSQAAPEYHIDTAAEEYQELTDASFDDEEELPPSSSSSSSAEDWDDTRQQPSARRAAAGAASSGHSRRALTMRAPEPVPLPGADVAARKYQSMDILPSQADLEAEDGGAFADAEGMESSCDDDARADDAVAGRGGDGGGCSSSSSSARWWTPAGAHGRRRQDRPRRQRAGQPQRWQEQQQPQPHEAQTGHAGAGPGPVAEARDRSSTDRDPMGRSNPSPGAGAGGRALAGGLAGSATAAAAAAAAGGMAGTSSFKSRSIAGGLPVGGLSASLALKASNSGRLSAAGAAPAAAAGLRVSGATRGAVNSSEPGGMLDGGVGGVIPGPSGGADVFRAARNPLYDLEHLDADMEPELEAAGTGTGLGRGPSGVMNLDAALWAFTEDGEARASNSGATGLVRMQPSHSAAAAAGRLGAGGGAGSNASSSHPMLETLGSAGPGSSQHMGLPPLAPAPSRGGGGGTDASAKYANPLFREGSMVSTSFTAAARAAAMAAARNVASMRTTAPLEPGGGIDAAAVAAAGGQDPGAAAAAAEQRLASGPALTWKGPSVSGEAAAAAAANGSGTAGPRGLAKVFSLKRSGTGARGQADAGSGSGSSAAAAVAAGAAVAAAAAASAGGGAGQEASMSVVRPNSVGAAPGAVAAAAAAAASSPQSQRRATSATSGLSFVQQQQQQRGGAASQRLHHQHLGGIAGSSGTGSASQLPGASATPRALAAAYGSAGGGRVGSVTGRYASVTGGAAAFGVLGSGNSLTGGGVPSTPGGGHVPKAAMAAYDVGLLNAGVGEVDMALVQRKLRALFWFRRPQILIWISHVNFLQNSLSLTLCIYYLFSYNTGNSILQVSSRLLYVWLPLLGANLLFMVYMGWVVVPLYTLVSTTCVRNPRALQAHIRRHKKAEAEEEGGITGFVLGLLTRCFMRSHHHTTRMAAKHGGSETTALNNLFMANLANQAGVIMAADAQLTNKKLGAAEAVYREYIDIWRTKARIAAGLEAAPEPGGFRLQADVTEFRSAFNALDADGSSTVTTDELFTHLHVLGTRATKTELKSMISQIDNDGDKRVDFDEFVVFMVFSVFDDNGNSCVEIPDIKKMCRRVRLQVTDEEVSAMMDLADPDGDRKIGLRQFFKLFKDVTIPELGPRPAHAELHGLVLPAASISAAAGSVPSRSAASRAYRNLGSPLHGSGGSVSMGPGGGGGAARSRLARATAVDPAAEGGSPPPPRRPGSGSHKGLRQGGSHNAIGSTAGSEIASGSPSVSGKGGGYSAGGLAAAGAATAAAYGVIGGPAYDGSALLPEQLSPLRRDTLPQQQQQQQRQQQPTRGAAEIVAASAFGGTPAPAPRHRIRDRALHRVAKQLTGGRAKEEVVVGWGSWAFQGGKGGSPISVRGGRAPTGRLIKLLRERYAKHVFIIDEYETKTCYNCGCQEMAIKRLGGLKEGQRPWSVKVCNDCLTTWNRDVSAANVIRVLLLLKLMGFERPTKLQRPPWPPAAAGPG

SEQ ID NO: 4539 - protein, 246 aa, Chlamydomonas reinhardtii
MSGLERLQPNRPQLAPALQAYVGGIPTAATASAARFEERLRYLFASGAAGPAAGQAAGQAEAAGPAEAGPRGAVHVLWHYHFSTFRRKRWAAFIQRDRALHRVAKQLTGGRPKEEMVVRWGSWAFQGGKGGSPISVRGGRAPTGRLIKLLRERYAKHVFIIDEYKTSKTCYNCGCQEMAIKRLGGLKEGQRPWRSVKVCNDCLTTWNRDVSAANVIRVLLLLKLMGFERPTKLQRPPWPPAAAGPG

SEQ ID NO: 4540 - protein, 918 aa, Chlamydomonas reinhardtii
MASHFEQARAAQERFDCGGPRLRPRRVLEAGGEAPLSRDCSQGTIKTTFKSIADPPGLEQLLHAQHPTAAAGKAAGQAPNPERFRGQSSIAEGFRRQRQHACGSDHPHHVTNDAAQRALRGFPDLDQHVMEDCMTAVTTSEHHQEVQHRDQRASRDPPSHKLAQYVYGHVFQVHRSEDRVGPPRSVTGLSNVVHQLARQMETNVGVHLATNFFRWLKTRCRVQLHRTLHPEAAAAAPDAGAGGGAGVELPRQQQTIVFALATAIAPDEPLCAYTDAVAALQSQPDVLQELELWVQREQDRWRPRGLLVPGCSFERLKNHSLPHGESYLAWAAEVLHEIEQHRSQLRARGVPKAKLARHFPVFGLLPEPSYQQVHIGLGQEAVKELLVHRDHFASEHHLIPPAAVPTGSWEEDKEAGKQARVSEEELLRLSLRGVDPGCSPTYWTCAMRWPWLPAWVVALLGVDLVLRLPEVRNGSCPVRWPDDLTKDQQAAAEAQLAAHLTASKAAAARDTLMTRTQAADRATAAASTAAARWAKEVQAAAQQGRAELVPPRPLALVVAQSAEHRKAAAVAAADAAAREAADTANDVAREATMSALVQGLRRHVEVLAAAHCAMLQLHRCLQQQQQQQQLAARVWDIADAQRISLLTERCLYATYSLMLEARAATAKQRHKRRAFTHCSGAEHRTNCGYAQHQRWQQWRLKADTALCAWQSSLPTARTVDVENVLGRLDYKYGGSTGAGGQGEAVVQPPVRELGFVDLLALYAAPAWRQKRLQVYCQKQRVLCREAVRLMGGEPEVTQQKGVVGWGGGSAGYHGTVSRAGQPPRKEFVRLLRERFARHVIVINEYRTSMVCANCGRLSLRRKELPQGGADFHVLVCNDCHTTWDRDENAALNMRLLLVLQLLGRDRPAVFCRQEGGVD

SEQ ID NO: 4541 - protein, 377 aa, Chlamydomonas reinhardtii
MKATQIIGVDPCGGGNWFMAARSPLYQPGPWAWEGVREGVSPAQRFLLELHDKQLDEELFPGQLPPEPRRRRKGGGRKGGHRRKQSKHWQPRARTARRRRQKRGRFHMSMGHWRHMSGLERLQPNRPQLAPALQAYVGGIPTAATASAARFEERLRYLFASGAAGQAAGQEAGQAAGQAAGQAAGQAAGQAAGQAAGQAAGQAEAAGPAEAEPRGAVHVLWHYHFSAFRRKRWAAFIQRDRALHRVAKQLTGGRPKEEVVVGWGSWAFQGGKGGSPISVRGGRAPTGRLIKLLRERYAKHVFIFDEYKTSKTCYNCGCQEMAIKRLGGLKEGQRPXTATSPPPSNVIRVLLPLKLMGFERPTKLQRPPWPPAAAGPG

SEQ ID NO: 4542 - protein, 210 aa, Chlamydomonas reinhardtii
MAVVLGVLCRSAVAGRGVCWGRRALRTELRSGAPSRVRGKPLWHYHFSAFRRKRWAAFIQRDRALHRVAKQLTGGRPKEEVVVGWGSWAFQGGQGGSPISVRGGRAPTGRLIKLLRERYAKHVFIIDEYKTSKTCYNCGCQEMAIKRLGGLKEGQRPWSVKVCNDCLTTWNRDVSAANVIRVLLLLKLMGFERPTKLQRPPWPPPAAGPG

SEQ ID NO: 4543 - protein, 227 aa, Chlamydomonas reinhardtii
MAPKRRRDEAEKAEEEKGGGAMTRQRPSAHHSPGQAAGQAAGQAAGQAEAGPRGAVHVLWHYHFSAFRRKRWAAFIQRDRALHRVAKQLTGGRPKEEVVVGWGSWAFQGGKGGSPISVRGGRAPTGRLIKLLRERYAKHVFIIDEYKTSKTCYNCGCQEMAIKRLGGLKEGQRPWSVKVCNDCLTTWNRDVSAANVIRVLLLLKLMGFERPIKLQRPPWPPAAAGPG

SEQ ID NO: 4544 - protein, 337 aa, Chlamydomonas reinhardtii
MRHHQVVYVPVTSSAGGGIAAAADGREPPADAVPPGLSSESRAATLAVSADVVVAFWRPAAPASARLWPGSSLFQQHPTLLLGALPELPEMSFRTEPLPRPLHPGPVQAAAHVRQQMEFELAALAAEVEAATREVRVEWSELLAAGQAAGQVEAAGPAEAGPRGAVHVLWHYHFSAFRRKRWAAFIQRDRALHRVAKQLTGGRPKEEVVVGWGSWAFQGGKGGSPISVRGGRAPTGRLIKLLRERYAKHVFIIDEYKTSKTCYNCGCQEMAIKRLGGLKEGQRPWSVKVCNDCLTTWNRDVSAANVIRVLLLLKLMGFERPTKLQRPPWPPAVAGPG

SEQ ID NO: 4545 - protein, 1370 aa, Cyanidioschyzon merolae
MKGICPGFDVRKTEFSGETQETYWKNIFDIKRLKVSKKKKFTGMIETDGLAICVHYRRFKTDRHVPSSALPETKHEDEKEEDPAMQNVQKNDFFVGADPGNTNIVTIASEIRSRMGNHECEEENRDLECRSERAPGSYERSDEPRSRLESFSGVHGSSRCALGGAVGGGVYKAPVGSFANEFVFWETACIREFFFNELSALKEDESQRLLVAYGAGRWKIQKETMPAPTTRTFKECARRFVTIPVDEFRMSYTHHELGCTLQNVEMEKCQRSPEEDIAKYGPLAEEQMERRAKARGLLALVSTTNDGKKRMEFVNRDLNAAINIRGWAVMEHKPPDRTRVNFIGQSLQVELYEKKLKPVVVGRSKKLGGVCTSLGDFLSRAGFSPLLYHWQQRLSFERRLLLEGDSGFCERQPAVGIMVRHTPRRGSGVGTAAPAVASTSRAKHGPVAATAVPQQASTPPCDVSGEDHASQPGASAETLEVPSDFGCDDLRPAASATRDSGKHLEPDAERFGSLEQVRQEAEAGTELTRSALGPRQVRKRVVQRRSATGAAERAPVSTHPPSDAAPRSGTSVGGTNTGQSGQDAWHPAGASGPDAPETPAAFITSAAVPESTGADLRWTPAPSSEHLTRGAVVMRSPQVDGPATAVIKRCPNCGGDDLEFGSSSGQTACMLCGHVVEENTVVNELQFVEGAGGHSAVVGQFVRTGSSGAASLGAAAAATAAGASLLYNASTAGVTRLTIGHRESRELTYAAGRRRIATIASQLHLPPRFVDAAHRLFTLAVQHNFVQGRRTQTVAAAALYIVCRREKTPHLLIDFSDTLRINVYVLGHTYLKLCRVLHLALPIIDPSFYIHRFASRLDLGEKQNAVAQTALRLISRMKRDWIHTGRRPAGLCGAALLIAARMHGFRRSQREIGAVVRVGDMTIRQRLCEIEETPTGTLTGRELAAESGLIESVAEEDTTEAPLAATADTSANAVSPEAVDTLDGCDPPAFRRRHALSSSSSLEWLEQQHHVLEQSKAAEQDIVADTSLTEQERAFLEASATAEGERVPVTVLVAPATSHGAVSNYVGSVRREASGPLAPLGAAADERAANPVTTGVIAGTSGLSTRSGPEGGANYRWLSDRVEELSDLDSEEEAMFVCTPEETAFREKIWTAMNQEWIEREAEIARWERDDPERYQRLMRKREYMRGFYKSNASNSAAAEAPWSHSATATAAAAAVATTTTAAAAAAAAAAAAAAPGGERPSTVAPAAVEAVVRSVRDAVRSAVTHSKRTSKKINYDALEQYDLGGRGDSIPTNDAETVAVADAAGRPSQPAPSLFDFGDQPAPERRPPVAQSSIPAPTRVAKRVVRQQQHHQQQQQRAASATPQPTHQT

SEQ ID NO: 4546 - protein, 338 aa, Cyanidioschyzon merolae
MVDATKHQGKKEADPATQEVQDKDIVVGADPGNTNIITIAAPKRAEDGMDGNLRQKDMRLLRFSRARYYRESVVVNARMIIVTWNAGIKHHLEALSEATSRGAVHEAFRKFMEFRVAHWDALWEEYRKPRWARLRMNLYGVKQRAFANFFNQLSAFEGDDRQRLVEAYGAGRWKNRKGTTPAPATKLYKECARRLVTIPVYEFRTSYTYQELGCTLQRVEMEKCQKSAEEIAKVRTAGGGANGKEGESSRVTRIDFHAAINIRRCAVLEKRPPEWTQEDFIGQPLKVELYEKKLEAVVGGSSRKAGGVCTSVGDDLSKARVRCGRVTSLIQTVFAKST

SEQ ID NO: 4547 - protein, 200 aa, Cyanidioschyzon merolae
MEVRVAHWDALWEEYTKPRWARLRINLYCGKQRAFANFFNQLSAPKEDEGQRLVVAYGAGRWKTQKGTTPAPTTRTYKQCPRRFATIPVDEFRTSYTHHELGCTPQREEMEKCQRSPEELAKYGPLTVEQMERSAKVRGLLALMRTTPNGYNRMEFANRNLNALINVKTSAVLERRPSEWTRENFVRQSLKVELYEKQLE

SEQ ID NO: 4548 - protein, 1856 aa, Cyanidioschyzon merolae
MEVHIAHCDALWEEYTRNRWIRLRMILYCGKQRAFANFFNQLSALKEDESQRLVVAYGVGQWKTQTGCTSVPSTRTCNECARRFVAIPVDEFRTSYTHHELGCTLLRVEIEKCQRSPEDVEKYGPLTEGQMERRAKVHGLLALVSTGSDGKKRMELVDRDFNAATNIRNCAVLERRPPELTQENFVGQPLKVELYEKQLEAVVGRASRNYCTRATSFHFRTAVVAAWLLSAKGTISGFATEMASDLTAEVVSALAVLHWGKSTGESRRQAHTFLCNVSKFFSADTIFALGRDLIAANLCYESLTRSAVPDADSNFARVVETAAVQYGFQLLVDLIERSQAEALSARTDTLDMCQTLCAFAVELWNHCHGTLAAGKRAFSCGERRKVAQFLARIVVQYWESSYGSRVLDHLLGSPLESAESMEIFSTIIEEILSAVAEETGIRQSAGAATVQLTADAIGERLVQEGSRIVLVALHMLRCEFTDPGPAFRASLQLLLKLLEGFPVELLLEADVPTSLVLFLRRRFEQMFGDRLVACADYDWLAIEALGCWITRAQPMLPKQRDVLGSLLETLISFVICFDEAYTGDVGLLIDAPIRWEERLSLLQAVIELTFLAFESTLTHLQERPAIWSSFILLLGRLVSHPWASIAELALAFCCRDQVLKTVLTAQCVVVLLDAAWMRCCMDTSLPAYLFTGKDIVENSVLDANDPRWRLMSFVLSRNAEQPKLNSSLRSRTRDFLRKICQNWRDACLDWVVTRAVDRMDCHRNRRSTGPVMEQFCFREEPAHLHSFWRGLLSVRNGQYPSDAESALFIEMLLDETREVMFFTMSEVLAPLLPSLGRGSGVSKPPGVSKTSSRGASSEVGGEENARLTQVLQLGERVEFVLSMVDTLDLDQDANKIHMILHVFFGCAPLLARIEGAQIRTIQAALRVLERIQQLPCTEHARWSAMGLHRREKWFDALCRGILALLLRSEGSETVSGAQVLLPSIQQALREAPMPFPARCSLLKCVPVIVCSLDSPEKSIPVLNALLEETLGIWKTMALQHEVLRDPERFLIAFLAPSADADTNRTCLLQLLTLFEQMLSVSMKHSIWKQTVMFGELLPTTLPQMVAALNHLFSLRPDGRGDISVLAPSRIEIAQWYRLVMEWMLRAGLLPEAIADSRQHRKELLKTRRSFIHISARGLLLFQRMLALDPDPDALKFYREICLRGIPQVDIEYLALIVRHVMKTLLQCEAQAHQGSDIWETDVTEIWLPLLRATAERIGQLAYEEVSDEESSTMDEVLHGAPHANEASSANEAFDQAAVALVELAVAMLKLESCSRRVQLFNWARDFLRKCLDWHFESASRKAFAFLRKHLSFWIHPAEGYLAIDTESLLQLENSIARALTDERWYSRPEDVRKVHAAVNDELYRRGFSPACFTTSELPSKHPNASMFPGENGGERMRALGNVAVRRSFNHGASTQLNEAAMAFPSSKMASQKHRPLSVRLLQSWKKRTQLYTMDLEDESINGDDDTALEGVAVLFGGHPAPQCAHPACDGKIERAADARVRPSLPRLWSVPRQLGATHTGNSRRQRRRLEAGAVIRGRCVVTRDFFDRLAPVGGTCVALGRGKQRNNGQGAVETGAMPTSQSSSVAALGGTQGFARKEPATGSQSAVQRVVEAVAERVEAILDGELREQERGASFGASATTTETDPELEALRERRLEALKRAAAARSRWCALGHGRLHELDDEEALLEACRSSERVVGVFWRLRTAPETQPLQDALAHALRSLAQQHLETRFWVAEAERFPSMCERLGVQVLPSILLIRNQQVVRTFAGLGEWVIAGRAGVRFSLERLAKTLRRHRITGVSLHPDAESRDAPSDSD

SEQ ID NO: 4549 - protein, 679 aa, Cyanidioschyzon merolae
MLSPHPTLLRASGTRARTQGGDEADVVPMCNIKSHFVSIDSGVLYGIMRQICPESNVSREEFSASQSEQAKGIHGNDRDRWSRHVCTLSAVEDRSSVPSSTSPSAKHGEKKEADPATLEVEDNDFVVGVNPGNTNIATITAPKRAEDGTDGNLRQKDMRLLRFSRARYYRESGIMNATKKIETRNAGMRDILEAMSEVTSRGAEFQAFREFMEVRVAHWDALWEEYTKTRWARLCMNVHCGKQRAFANFFNHLSAHKEDESQRLLVAFRAERWKTQKWTTPAPTTRTFKECAWRFVPIPVNEFRISYTHHELGCTLQRVELETCQRSNEDIKKYEALTEALMKRRAKVRGLLALVSATNDGKKRMELVNRVFNAAINIRKCAVLENRPPEWTRENHTGQPLKVERYEKTLEAVVGGRSKKTERRLHDGVRWCSLMFGSSRRATVRKSLSIIEEDEDEAVSECDSPAELRHRITDGPRKFDAVGVTGHGVESDESSAGNETMPSRAHKVPLGPVEQSRLGTSARSRRQEQRGQNTDQIREFQVRLQETQDALRKTQAEVSMLRAHVSALEMALEERNTEVRRLREQLASSAPGASGTLNVQQGKVASAVGRDLLGLLRSSHASAADSPISISTVSEGALKPSLPSRLVELRANTSPTASSSASNILLGTPDTGKSSMGKR

SEQ ID NO: 4550 - protein, 290 aa, Cyanidioschyzon merolae
MVGAAKHVENKKAGPRTQKVQDNDFVVGADPGNTNIITIAAPKRAEDGIDGNLRQKDMRLLGFSRARYYRELGMMNARKKIETWNSGMKDHLGALSEVTSRGADFEAFRKFMEIRVAHWDALWEEDTKPRWARLRMNLYGGKQRAFANFFNQLVALKEDESQRLVVAYGAGRWAPKKENTSSPTTRVYKECARRFVTISVDEFRTSYTHHELGCRLQRVEMEKCQWSPEEIAKYGPLTDEQMERMAKVRGLLALVSTTNDGKKRMEFVNRDFNAAINIRRCAVLEKRPPE

SEQ ID NO: 4551 - protein, 413 aa, Cyanidioschyzon merolae
MGKRFNVVPMSNIKSHFVTIDSAVFYGIMKEISLEFSVSREDFTGENRETYWKSIFDFKRLRVSKQRVFTGLIETDGVSLCIDYRRLKKDRPVPPSAAPVPKHEDEKEADLETQKVQDNDFVVGADPGNTNIITIAAPKRAEDGTDGNLRQKDMRLLRFSRARYYRESGTMNARKRIETGNAGRKDLLEALSEVTNRGADFEAFRKLMKVRVAHWDALWEKYTKPRWARLRMNLYGGKQRAFVNFFNQLSALKENENQRLVVANGAGQWKTQKGCTPAPTTRTYKECARRFVTIPVDEFRTSYTHHELGCTLQRVEMEKCQRSPEETAKYGPLTDEQMERRAQVRGLLALVRTINGKKHMELVNRDFTAAINIRKCAVLEERPPESTRENFVGQPLKVELYETKLEAVVHGPP

SEQ ID NO: 4552 - protein, 439 aa, Cyanidioschyzon merolae
MHRDVTHMERVEVSDEFFDKTFIRQLMLGTGGMRRENELVHALHEIFVEFPFEVNHGPETPFDSEPRTFHDTRRVCTLPGSISRWKMCDFQGITNDRKHEDEVEFGDKKAPRRSTNEASVIRAAIQEHHAVFGLANPAEKVPELKKDMERHYRLILRARETEGFPNGEALLRHPVMEHTAPFCLYRLQSRLRHHEVDQSRVQCQQGGILRKQRVFTGMIETDGVSICVDCKRLRAYRPIEPSASPMTKHEENKETDPATQEVQDDDVVVDVTRYEDEKEADCATQKRKYNDFVVGADPGNTNVTAIAVPRRAEDGPDGNFIQKDMRLLRFSRARYYRESGIKNAWKEIETWNAGMKEHLEALGEVTSRGADFQAFREFMKVRVGHWEALWKEYTKPRWSRLRMNLYVGKQCAFANFFNQLSAFKEDESQRLVVAYGAGR

SEQ ID NO: 4553 - protein, 781 aa, Cyanidioschyzon merolae
MVDATKHQGKKEADPATQEVQDKDIVVGADPGNTNIITIAAPKRAEDGMDGNLRQKDMRLLRFSRARYYRESVVVNARMIIVTWNAGIKHHLEALSEATSRGAVCEAFRKFMEFRVAHWDALWEEYRKPRWARLRMNLYGVKQRAFANCFNQLSALKEDDRQKLVEAYGARHWKNRKGTTPAPATKLYKECARRLVTIPVYEFRTSYTYQELGCTLQRVEMEKCQKSAEEIAKVRTAGGGATGKEGESSRVTRIDFHAAINIRRCAVLEKRPPDWTQEDFIGQPLKVDLYEKKWKQTLVAGPKKRGGVCTSVGDPLPRARSPLLYTAGGNVCLWKDVLCWCECPPRVRFRGLYGNERPRRSLLSARRRQLPRPGGTGAVMGVKADVNEGNGHSVNSALRATGRRDFDSTLSADPTTNVGGVFEECLRSVQPLLPLPPGFRQEDYLFERFRCTYWAKPAAPPASPARPAVICIHGFGAGAFHWQKMLNIISEAGYDAYALDLLGFGDADMPPPLFTTQGDGKVGSPTFSYTFESWAQQILHFINTVVVTASDTGISQQRDVVLVANSIGCVAALQAACDMLRQSVEHPGMQGTRIRAVMCLNPSLRQLHYKKRRGLRVWTTPLALRVLGFRPVAKFFFSLVSRPATLRRLLCSAYAVDGPEADQIISTELVERIRAPSRRPGALDVFLAFTSYDRGPLAEELVESIAQMAATARKDPPAIWVLWGERDPWEPFALGRELFARNPHVDRFVALKAVGHCPHDQDPNTVWRYVSEMLESVERER

SEQ ID NO: 4554 - protein, 243 aa, Cyanidioschyzon merolae
MEFRVAHWDALWEEYRKPRWARLRMNLYGVKQRAFANCFNQLSALKEDDRQKLVEAYGAGRWKNRKGTTPAPATKLHKECARRLVTIPVYEFRTSYTYQELGCTLQRVEMEKCQKSAEEIAKVRTAGGGATGKEGESSRVTRIDFHAAINIRRCAVLEKRPPDWTQEDFVGQPLKVELYEKKWKQTLVAGPKKRGGVCTSVGDPLPRARSPLLYTAGGNVCLLRGVRCGRVTSLIQNVFAKST

SEQ ID NO: 4555 - protein, 772 aa, Cyanidioschyzon merolae
MIRTVFALYPGISRNGKWTIINGIMKDRKREDEVEFVDKKASNETTNEASAIRAVIQEHRAVLGLPNPTDKVSELSKDQERYDRLILCYFVFLDRELERKAEMKLNGKNEEWERRKAFLVGKRFDVVPLGKIKSHFVTIDSRILYGIMKEICPEFDVSREEFSGENRKTYWKNIFDFKCLKVSKQKVFTGMIKTDGVALCAHNRRLNADCSVPSSAAPVTKDEDEKEAGPTMQEVQDNDFVVGGDPRNTNIITIAAPKRADDGTDCNLRQTDMRLLRLARARYYRESGIVNARKKIGPWNAEMKDHLEALSEATSRGADFEPFRKFMDVRVAHGDALWAEYTKPRWARLRMNLYCGKQRAVANFFNRLNALKEDGSQRLLVAYGAGRWASKKGSTTAPSTRTYKECTSRFVTIPIDEFRTSYTHHELGCTLQMVEKEKCQRTPEHIAKCGPLKEEQMERRTKVRGLPALVRTSNDGRNGWKKRPPEPTRENFIGQPLKVELYEKKLEPVEGGRAPVATTVHRWRRSTFEHRVARDRESFFERNHIFRACLGAATAKRPPTAGNAGGARKLPIRWRRRSGCGCCAPNQWSYSRSATTTVAFAWDWLLAPRSVVENKGVLAALAQSNEQAIVRMVREPARQLWVEDGISLPAPFPETNMPTLPFSEGLTAAPNLRPHWEGIRSSETEDRTLILFENLSDSGVVVEVNWIDFNGQEIPFGWLEPGKSRFQPTYVGHPWIIRDSNTGEVMLLFVTQNAFGTAVVHSGHQVEYSYPL

SEQ ID NO: 4556 - protein, 1479 aa, Cyanidioschyzon merolae
MCVHYRRLKKDRPVPPSAAPVTKDEEKEEADPATQEVENNDLVVDAAKHEDEKEAGPETQKVQNNDLVVDADPGNTNIITIAVPKRAEDSTDGNLRQKDMRLLRLSRARYYRESGMKDHFEALSKVMGRGADCKAFRKFMKVRVAHWDALWEEYAKPRWVRLRVNLYCGKQRAFANFFNQLSALKEDENQRLVVAYGAGRWKTQKGTTPAPTTRTYKECAGRFVTIPVDELRTSYTHHELGCTLQWVEMEKPQRSPKAIAKYGPLTEEQMESRAKVRGLLALVSTTNDGKKRMEFVYRAFNAAINTRRYAVLETRPPVLTRENFVRQPFKVKLYEKQLEAVVGGRSKKLGRVCTLVGEVLSTAGRSPLLYTGGSVFLLKGTAQRRRLVSNNRGALHVQCRAARGAKRSADAEDLANAGDRRAGVIRCLQRAQNACIESPTGTGKSLALLCSALAWLEKEKERSEPSLLAVANHADMHSEFKPETEEPADEKQSIPKLLPESRSAADDCGVQDVDDDDDDDDFTSRPAPRVSQLKSASQRWRQQGAVAGTRHRYPLCGKQVPLNPLCSVAVHLEGTNLAVQQRHPRIFFCSRTHAQLSQVIAEMRRTPYAGKMRSTLLASRKHYCVHEDIQRAPSTLQAEACQRAVQLSFMEEAKSAADASSTVADPLAGISPCFYHHSAAVRRTACSAPQPFQMEDLVQVGRHWHGCPYFASRFLVHGDIQTEPNQDSVEGSSVPDERSHTGSASSTDGAVSARATSCTTRTRTIIEPADIIFSPYSYLVDPLIRRRMDIDITGAVLIIDEAHNIEEVCLEAASVDVSLSQVQRVLLQLDHYLGVQMPETEPTLETLMVRRPSLNGTALLRVFRHWLQALASFIETRIPLLDDIHGIPESHRPTSGPCTAAQRLHAQATVFWQDGALLHELEVGFFQNFDFEQWNWSMGQLNRFLDRWRQKQQRTVPALASGMAASTGFGTETATEEHAEQSVQARPTTGDERAETEPRFASLCGEVLHLLERFHIALQFIYGGQSSKGAAAPAEASLLHATDYRLVLRREMRQGTYGGVEFKLGLWCMNPAIAFRHLRDNARSIVLTSGTLSPMESFRSELATDFLCQTECDHIIDPEKHVRVCVVGTSSSGDRLEGSYRTSATWSYQDAIGEALAHCSAQIPDGVLCFMPCYRVLESMLQRWSSTGAIERICGAKRLFIERSSGQVITEYATETAGGYRLQRRGWRDSCFTPAREYGTDASVAALGERPSSLRAASSSILSRDRSKRKRRGAGRAYTSASAYANRDALQVYYDAVDAARTETTASAPVPAANARCRITADHKNGAIMLAVCRGKISEGLNFADQYGRAVIMVGIPYPNLTDTFVQLKMRYNDERSGAVSGAPINATSTSRLSGKQWYVLQAHRTVNQALGRCIRNPKDYASIILLDVRYRDTRTVNCMCRWIRDPLRDYIARHGQTLTLEAAVREVAEFFFQKYDAK

SEQ ID NO: 4557 - protein, 425 aa, Cyanidioschyzon merolae
MKEISPELNVSREGFSGENRVTFCKRIFDFKRLNVSKQGRRLKKDRPVPSVTKDEDKRKADPATQKVQDNFFVVGADPGNTNIITIAVPKRAEDGTDGNLRQKHIRLLRFSRARYYRESGIMNARKKIDTWNAGMKDHLEVLGEVTSRGADFEAFRKFMEIRVAHWDALWEECTKPRWARLRMNLHCGKQRAFANFFNQLSALKRNESQRLVVAYEAGRWKTQKGTTPAPTIRTYKECARRFVTIPVDEFRTSYTHHELGCTLQRVEMERCQRTPEDIAKYGPLTEEQMERMAKVRGLLALGSTINGKKRMEFVSRDFNAAINVTICAAMERRPPELKRENFTGQSLKVELYERKLEAVVAGPPSKAGRHLHIRWRLLVLGEFLATTVHCRQQRFFFWKLCVVVLALEWSSFTTPSDEAYVRYPT

SEQ ID NO: 4558 - protein, 448 aa, Cyanidioschyzon merolae
MIRAVFALYPGIARKGKWAITNGVTNDRKHEQEIEFVGEKASNESTNEASVIRAVVEEHRAVLGLLSPTDKLSESKKDKERYYRLALRYFVLLDGELERKAEMKLNEETNEEWERRKAFLMGKRFNVVPMCNIRSHFVTIDSGVLYGIMREISPEFNVSREEFSGESRETHWKKNFVDFKRLKVSKRKVFTGMIENDGVAMSVHYRRLKTDRPAPPVAKDEGTKKEDPATHEVHDNGFVVDAAKHREKKEVDRATQKVHDNGFVVGADPGNTNIITVAVPKRAEDSVDDNLRHKDMRVFKFPRARSYRDSGVRDHLEALSEVTSRGTDFEAFREFMEVRAAHWDALWKESTKPRWARLRMNLYCGKQRAFSNFFNQLSALRENESQRLVVAYGAGRWASKKGITPAPTTKTCKECARRFVTIPVDDFRTSYTHHELGCTLQRVEMEKY

SEQ ID NO: 4559 - protein, 421 aa, Cyanidioschyzon merolae
MIRAVFALYPGIARKGKWAITNGVTNDRKHEQEIEFVGEKASNESTNEASVIRAVVEEHRAALGLLSPTDKISESKKDKERYYRLALRYFVFLDGELERKAEMKLNEETNEEWERRKAFLMGKRFNVVPMCNIRSHFVTIDSGVLYGIMREISPEFHVSREEFSGENRETYWKKNFVDFKRLKVSKRKYRRLKTDRPAPPVAKDEGTKKEDPATHEVHDNGFVVDAAKHREKKEVDRATQKVHDNGFVVGADPGNTNIITVAVPKRAEDSVDDNLRHKDKRLLMLSRARYYRESGIMNARKKIVSWNSGMKDHLEASSEVTSRGADFEAFREFMEARAAHWDALWKESTKPRWARLRMNFCCGKQRAFSNFFNQLSARRENESQRLVVAYGAGRWKTQKGLCQLQRQKRARSAHGVSLRCP

SEQ ID NO: 4560 - protein, 222 aa, Cyanidioschyzon merolae
MEGRMTHWDTLWKEYTKPRWARFRMNLYCGKQRAVANFFNQLNALMDDNSQRLVVAYGAGRWNTQKGTSPAPTTRVYKECARRFVTIRVDEFRTSYTHHELGCTLQRVKMEKYQKSPEEIAKYGPLTEEQMERRAKVRGLLALVSTTSDGKKRMDFVNREFNAAINIRRLAVLEKRPPEWTRENFIGQSLKVDLYEKELESVVGDRSKKAARRLHVSWGRFV

SEQ ID NO: 4561 - protein, 597 aa, Cyanidioschyzon merolae
MYKYVTHMETVDIPDEFFDKTSFRYLMHGTAETWRENVLVHALYEKFVEFRFEGAWYRGDSHIYTYGAMKFITNLKNHLTENLECFMIRTAFALNPGISRKGIWSIINGITKDRQHEDDVEFVDKKTSKGSTNEASVTRAAIQEHRAVLRLVNPTDKISKLEKDKERYYRLFLRMGKTEGFPNGEALGRGSVVQHQVTFCDYRLQIPHDITKEISAEFNISREDFTGENQETYWKKIFGFKRLKTSKQKVFAGMIETNGVAVCVHYRRLKKDRRVPPPAAPSTKHEDENESDPATQEVEDTDLVVGADPGHIIIINIAARKRVADGTNGTLHQTDICLLRFSRARYDRESGMINARKKIETWNAGMKDHLQALSEVRSRRADFTAFRNFMEVRVAHWDALWEDYTKPRWARLRMNLYCGKQRAFANFFNQRTEQRAGRPKNGTMPAPTTRTYKECARRFAAIPADEFRTSYTHHELGFTLQRVEMETCQRSHEEIANYGPLMGEQMDKRAKVRGLLALVSATSDGKKRMVLVNRDFNAATNVKRWTVTERRPPESTRENFVRQSLKVELYEKQLEAVVGDRSEKAGRRLHVRWRRRV

SEQ ID NO: 4562 - protein, 416 aa, Cyanidioschyzon merolae
MIRSVFALYPGLSRNGKWAIINGITKDRKHEDETEIVDKKSSNESTNEASVIRAPSKEYRADLGLANPAEKMSELKKHMEKYNRLILRYFLFLDRELECKADVKLSEENNEESERRTAFLMGKRVNVVPMCNIKSHFVTTDSRVLHGIIRKISLEFNVSREEFTGENREPYWKNIFDFKRLKVSKQKVFTWMIETDGVAMDVHYRRLKADRPVPPSAAPSTSHAEKKEADPAMQEVQDNDFVVGADPGNTNIITIAAPKPGEDDTDGDLRQRDKRLLRFSTARYYRESGIMNARKKIDTWNAGMKDHLEALSEVTSRGAGLQAFRKLMEIRVAHWEALWEEYTNPRWARLRMNLYCGKQRAFADFFNQLSALKEDETQRLEVAYGAGRWKNRKKGLRQLQRQQRTKSVHGVSLRYL

SEQ ID NO: 4563 - protein, 1013 aa, Cyanidioschyzon merolae
MGGVYQAPVGSSAYESIRWEAAGVREFFNQPSALKEDQSQRLVVAYGARSWKTKKGCTPAPTTRVYKECARRFVTIPVDEFRTLYTHHELGCTLQRVEMEKCHRSPEEIAKYGPLTEEQMERRVNVRGLLALVSTTSDGKKRMEFVNRDFNAAINVRRCAVLENRLPESTRVNFVGQPLKVELYEKKLEAVVGGRSRNGGKASAHQLDTLCLGRGFPATTVHCRRRRSTFERRLEARLWRETLGGRYLLQTLCVQRHTGVGVPGAEEQSGNVSIQERRIIEFLLQFRSAPNVFPYRDQLVRQLHARKHWIQIKIEDVYAFDEELAGYIRQAPNEWIERLEQAVDRVVRRLRLPLDHEIGGVSVQVLLQSQENAFPLRELQSDQLGRLVRVQGIVISASKVRAKAQVVWLRCQHCDYRKMIRASVGFGGFQVPRQCDRVTEMRCPLDSYEVMPHESVFVDHQTVKLQELPESVPTGEVPRSLLLVLERNLIDRVAPGERVSAVGVYSTYASTRDRSSRSVAANIATRASGPDLVAAVRTPYIRVLGIDATQERRDRHPGFTPEEEEAMRSLSRLPNVYEVLAASIAPEIWGLSDPKRAVLCQLFGGSRKTLPDGMRIRGDINVLLLGDPSTAKSQLLKFAEKVAPVSVYTSGKGSSAAGLTASVIRDATHGEFHLEGGAMVLADGGIVCIDEFDKMRLADRVAIHEAMEQQTISIAKAGITTVLNSRTAVLAAANPLFGSFDDTRTVADQMEFASTILSRFDLIFLVRDVRNDERDRTIARHVLALHQRGHSLRPQGSGLDSAGDISDSGMLSLSPNGASEFTSSQMLNAVGLVPIDKLRRYVAYARRRCRPRLSAEAADLLRTAYVAVRQELRDRTADGPTPVPIAVRQLESLIRLTEALAKMRLSDLASAADAEEALRLFRVATMAAAHAGALPPGAFEGTLSGEFLIEVQAAEAAIRRRIAIGSMLALNRLVRELTQQHLSAAATQRAIQIMLGRQELEWRRQRTVLCRLR

SEQ ID NO: 4564 - protein, 313 aa, Cyanidioschyzon merolae
MCVLYPRLKRDRPGPSSANHEDVKEADRATQKVQDNDFGVGADPRNTYIIRIAAPKRSENGTDGSLRQKDMRLLRFPRTRYYRESSIMNARKKIGTWNAGMKDHLEALSEVTRRGADCGVFRKSMEVRVAHSDPLWEEYTKPRRARLRMNLYCGKQRVFVNFFNQLSALKEDKARGLVTGSNDKSVRGVRTPVCYNTCRVDMEKCQRSPEDIKKHAPRTEEQMQRRAKVRGLLASVSTINDKKRMEFVNRDFNAAINIRRCAVMETRPSESTRGNFVGQPLNVEPYETRLKAVVGARSRKTGRRLHISWRLFV

SEQ ID NO: 4565 - protein, 994 aa, Cyanidioschyzon merolae
MDMQVRDPVRQVSPAAREKQKAVSSPEEKERTRKKRQEARSQGPQERRMYDDTVVIACLFGHITDTYEEKLRDAIRNRVDSYSMSIRKASSGLMHLVMKMNENVTHMETVAVPDEFFDKTFIRNLMLGTGETRSENSGFTPSTKNIPFTGSRLTELMNHLTMNLERFMTRAVFALYPGISCNGKLAIINDITNDRKHEDEVEFVDKKESNESANEASVFRAGIQEHRAVLGLANPTNRVPELKKDKERYYRLILRYSVFLDRELERKAEVKLSEGKNEESERRKAVLMRKRFDVVPMCNSKAYFVTIVPRILHGIMKEISPEYIVSREDFTGEKPGHVLEECLRFQTAQSQQTKEADPATQEVEDNDLVVDAAEHEEYKEEDPATQKVQDNDHVVGTDPTHTNIIRIAAPKRSENGTDGSLRQKDMRLLRFPRTRYCRESGITNARNKIGTWNAGMKDHLEALSEVTSRGADCGVFRKSMEVRVAHSDPLWEEYTKPRRARLRMNLYCGQGSRARSSLRSRAMEDPKSVYTGSNDKSVRGVRTPVCYNTCRVDMEKCQRSPEDIKKHAPRTEEQMQRRAKVRGLLASVSTINDKKRMEFVNRDFNAAINIRRCAVMETRPSESTRGNFVGQPLKVELHEKKLEAVVRGRSRKTWSVCTSNGVFLSGARSPLLYAVGVVRLSNGVDGRAFVAASVRLPVQRRRRLQCCRLDTRMRSTATTSPGSDDPTEETRSKEKETGVSAWAERQHRTRINLVGVFFLLVTFAWSLPLFIIMLILYPFVLILDPYRARVYDWIAMLWMRLSMLSTGIHPRVVGTENLLPPDATVLYVCNHNSYLDIYTVAFLGRFFKFVSKRSIFAIPIIGWAMGMARQIGIERDSRRDQLRVFREMVSRLEHGVSLLLFPEGTRSKDGTLRAFKQGPFRVAKQAGVPIVPLTITGTAEVMPPWALAPLRWPKQRITLTIHPAIQTADHSVTDLIEAARTAIASALPPGLCGR

SEQ ID NO: 4566 - protein, 1190 aa, Cyanidioschyzon merolae
MVGAGNTRRENVLVHALHEKHPFYSFEGTRYKGDRDMYTYGAKKYLTNLKNHLTMDLERFMIRAVVALYPRISRNGKWTIINGIMKDRKREDEVEFVDKKASKVSTNEASAIRTVIQEHRAVLGLPNPTDKVSELSKDQERYDRLILCYFVFLDRELEGKAAVMLREETNEEWERRKDFLMGKRFNVVPLSNIKSHFGTIDSGILHGIMKEICSEFNVSREDFAGENRETYWKNIFNFKRLRVSKQNLFTLMIETDGVALCIHYRRLKRARPVPPSAAPVTKDEDKEKAGPATQEVEDNDLVVGAAKHEENKEEDPATQEVENNDFVVGADPGNTNIITIAVPQRAEYGTHSKLRQNDMRRLRFSRARYYRESGIMNARKKIEIENAGLKKHLEAMSKVTSRAADFEAFLKCMDVHVAPWEALWEEYTKPRWARLRMNPYCGKQRAFANFFNELSALKEHESQRLVVAYGAGRWKTHKGTPPAPTTRTYKENARRFVTIRIDEFRTSDTHRELECTLQRVEMEKRQGSPEDIAKYGPLPEVQMERRTKVRGLLAFVSTTNDGKKRMRFVNQDFNAAVNIRRCAAIEKRPPQQTRENFVGQPLKVQLYEKKLKPVVGGLPSKAGMRLPVSWRLLVRGAFAATTVHHWRQRFSLDRLLFSLPSSSRSKMNAEPGVPNSDHNRTRQMPGGNTTEQDALADRLLRFLDASPSPYHAVETAKLLLETAGYTELREDCSWLGRVHPGGRYYTTRNESTIVAFRVGRAFHVDAVNGGELRLVGAHTDSPCFRVKPRSRVSDANYEKVAVECYGGGLWYTWFDRDLKCAGRVIWRCASPTDPAQGTSRSTSWQCTLVHVREPILRIPSLAIHLDREVNQGFAPNRQTHLVPVAATALNRTKLPQCQERHATALTGAVIHTLQQDIMPVKEDPMSITRDAGGIVIHDFDLCLADAQPASIGGVQREFIFASRLDNLFSCFAALEALLSLDSEAGVESGAESAVCMVALFDHEECGSGSAQGAASPLVSDLIRRVLACLWTGKTDAGAFEDAVQYTIRRSFLISLDMAHAVHPNYAEKHESGHQPLLGHGPVLKVNANQRYATDGWSAHLLRAVAECCDSPIPLQEYVVRNDMPCGSTIGPIVAAGTGVRTVDVGAPSLSMHSIREMAHVRDLWYTVKLLQAFMRCFGEVRASHNTACVT

SEQ ID NO: 4567 - protein, 602 aa, Cyanidioschyzon merolae
MLPSVPSSARLGAATVMIFVFPESTPTRNRSSAPPALSGPPPGPSSASPVAKDAKHVDEKSADPAMQEVQGKDFVVGVDPWNTNIITVAAPKRAEDGTDGNLEAISHVTSRGADIEAFREVMKIHAAHDESLWKECTKPRWARLRMNLYCEKQRAFANFFNELSALKKDESERLVVANGAGRWASKKGTTPAPSTRTYKECARRFATIPVDEFRTSYTLHELGCALQRVEMEKCQQSPEDIKKYGPLTEEQMERRAKVRGLLPLVSTTSDGKKRMKFVNRDFNAPINKSRCAVLEKSPPEWTRENFVREPLKVELYEKQLEAVAFCPCVRAAPSSQVHRIGRFPSQSLGLESPAFRTCESALFFMVEVESDSVAERDRSSFLAGHDAIRLAKSCVDSPPERWYAALYQVYADLTKLRCWSNVEVVYSDSATFPTGLLGPLFEEDSMVQELHSAQCILGSERACFHVRCCIVGSPPSGRAINALSPQSETRTEERIITSRREPEVVIAVPMHAMLKLSNLDQALRMSSHIEGIVKNRHVADSSASTHSTDRQAGSRKSSVIFGFVDEDTTTAYYRIREGACESNDRREFSTDDIASCLAQERT

SEQ ID NO: 4568 - protein, 1715 aa, Cyanidioschyzon merolae
MKIHAAHDESLWKECTKPRWARLRMNLYCEKQRAFANFFNELSALKKDESERLVVANGAGRWASKKGTTPAPSTRTYKECARRFATIPVDEFRTSYTLHELGCALQRVEMEKCQQSPEDIKKYGPLTEEQMERRAKVRGLLPLVSTTSDGKKRMKFVNRDFNAPINKSRCAVLEKSPPEWTRENFVREPLKVELYEKQLEAVSRAHHSPLLYTAGDSIFLLKGVCFRGVSGLNKKRSFPFRCMSLHKSDSNQLLVSLVVEHAKRATPPPEESGILFDEKGSQISEHHAAPALEGSSATWPFVPARPREVSSGSDNACENGRALRRLHRTPSPEVTGSGSPTSHANVVGTCFVTGFVVEKDDSGTDVTGCGESRASEKTSGRPFRREVTAADSRLNLSGEHLACVSLEQLRSLPSLAALNEISLASNSLRSVDLRPLASCRSLQVLLLNDNLLERIDLTPLASCSQLERLWLHRNKLKHIDLSPLAISGSALRSLYLSRNELQEISLAPLEKCSKLRALQLEGNPNLKEIDVTPLFACRELSSFEAPPQARLIVRELAALEVQRRSYQQDCNSLANVESSESARTAAIMPSKLVLPKVFRRRGIVLHWIREALPDANLRDLTGQRSLKENSVNAELQDAERGEGIQTNASMNIIAPASEEALSSVAELQTGPTASRNLESVQEDKTPLCALIVGMTTHRRISTCRLLEQSGTLRVLQSPSAAAALDAYISAPDGIDLILMEPAEYEVFSEQAQAASIEISVPVVAVGPPEFERSGVFRRCIAIGARGFISFPLDNRDAQALTEVARSFRASRQTSASQVLKESSVSELLLPTQEVRADSTSVSRDLSPMSMTNGSDASKYGAGIEPDSKWVPSWWQNSDSIRKEGNSSPAAVSDRMDTFLSKSEGVEDIAEESSTYRFIQRAGIGHLRSGSPICRSGSESSQFACERAEWARVEAIFAHRDKRPSREPCFQLQFMQHCSNPATLLIPTDGYHSAGLERFADIAAVCRLPKTSATVLFLRVLSHQDKLANSGTSSISNALTRSASESVSSNCWLRNIHVDAFYHFYRCKLAPIRSPLERFYNVIASSWPGSDIHDSSSSLYAEGKIRRLKESRARYVSRYTITLLIQELVYRKLCVGRNASGVAVPYHAAKANQGQMRSARYSYQGKSFLSSSINQSGSASAMESAHFSSKNGEAARNAFLAFRDEVCEVLLTASVASACVWFHLGGGNRNYVPLSILRKVRFAEAIFAAERGIIVDSLMEMLTGNGIALVAQKELETVWNYNARTGTATSEQLASRDAPSFECSIPSVSGLSSSFPEQQSDGAVTQAPSGATESREQIAGAIRSSFLPDTFEFSKWCRKFCISREAAVSYFLDRGSLVPKAVEQVLNRFRGLSLVQKPASSEHSAATPQLQDEKTVPEDQNLAPFSKLGNASVGDSLSPSAFVHLFLALCDPGNEKALHIFFDIMDLDMDGFISAADVAYFYREKCEIAFREGLVLASANNLWAQLVDMCRTSANDPKLESKGITLKMLRDIGERRRSSFIRNVLFKDDGMALVDIQQTLRLTSGFDNLVLSHWNDCVLLVLDNGTQLYMKDTAYFVIALASSSLQLHALFGRLTAMHGCEHDYAVRVGVASRGVRPKIRSSAQKSLMSALSEARIGTYGAASVPKETKWKSQAFPQADTNSASVAERAIARASAPCKWMARSCERTGAGLTPMPE

SEQ ID NO: 4569 - protein, 501 aa, Cyanidioschyzon merolae
MKEHLGAMCEVTSRVADLEAFRKFVEVRVAHWDALWEEYTKPRCARPQMNLYGGRQLAFANFFNQLGAFKKDKSQRLVVAYGAVRWAPKKGTTPALTTRTYKECARRFVPIPVDKFRTSYTHHELGCTLERVEMEKCQRSPENKTKYGPLTEEEMERRAKVRGLLALVSTSSDCKKRMEFSNRDFNATINILGDVRCWRRDLQNSQDGTLLDNPAKPRYMRNSWKHYASCGHLQMAGSRASNLKQTREKRQRAVASASAAAAVRWESIDAALCEQRATAVTRSLIWAYLILAVVLVVFPALYTHAEDSGLLSSAPRLFAMAATAITLVNMLLVSTSVVFIGARVSAARDRLRRWALEQSRTRAGADDSESVAAALAALEREVIGRGDALRFPLVASLGLIALFMAIRLAGLDDEYPLAAAGPAGAPIAAIAAHQTVGDAHGAAVWTFQGYALGTRSRCAGHGARAAASLLVSAVERSRRCDPEQYFCGKPGSCGHRPIGHW

SEQ ID NO: 4570 - protein, 627 aa, Cyanidioschyzon merolae
MYRDVTDMETVEIPDEFFDKTFIRQLMLGTEETRKENERVHALHENFAEFRFEMNLERFMIRAVVALYPGISRKGIWAIINGITKDRKHEDEIECVDKQASNEGTNEDSVIRAAKQEHRAVLGLANPTDKISELKKERYYRLVLLYFVFLDRELERKAEMKLSEEINEEWERRKAVLMGKRFNVVPMSNIKSHFVTIDSRVLYGIMKEISPEFDVSREEFTSGNRQTCWKSIFDFKRLKVSKRKVFTGMIETDGVALCVHYRRLKKDRPVPPSAAPVTKDAENKEEDPATQEVEDNDIVVDVTKDEDEKVTDPATQEVQDNDHVVDAAKHEDEKEEDTATQKVQDNDFVVDVAQHEDEKEADPAVQKVQDNGFVAGADPGNTNIITIAAPRRAEDGTDGSLRQKDLRLLRFSRARYYRESGIMNARKKIPAWNAGMKDHLEALSEVTSRGADFQAFRKFMEVRIARWHALWEEYTKPLWARLRMSLYGGRQRALANFFNELSALKEDESQRLVVAYGAGRWKTQKGTTPAPTTRTYKECARRFVTIPVHEFRTSYTHHELGCTLQRVEMEKCQRGPEEIGKHGEVTEQQMERRAKVRGLLALANTTTDGKERMEFVNRDLNAAINIR

SEQ ID NO: 4571 - protein, 432 aa, Cyanidioschyzon merolae
MRLLRFPRARYYRESGVMNARKKIPAWDAGMKDHLEALSEVTGRGAHFQASRKVMEVRVPHREALREEYTKPRWARLRMSLYGGRQRVLANFFNELNALKEDESQRLVVAYGSGRWKTQKRCTPALTTRTYIECARRFVTISIDEFRTSYTHHELGCTLQSVEIEKCRSSPEGIAKYGPLTEAQMERRAKVRGLLALVSTTNDGTERMEFVNRDFNAAIKITTCAVLESRPPELPRENVIGQPPKVELFEKKLEAVAGGRSKKAGRRLHLSWRRRLGRIVRRYCTPPSFDFQTAVRAGPVAVKSPVFVAVRPPRAPWYLICICIFRVYESIINCDMSSGAQDTSSAQSALKDTEKKAGGALDSAKESVTGAFSSAKETISDKFRDLTGQKSAQEKAQDKAGDAVDHLKETGQSAKKGIEHAADATKEKFQGN

SEQ ID NO: 4572 - protein, 376 aa, Cyanidioschyzon merolae
MAVPKRAEDGINDSPFQRDMRLLRFSRARYYLELGIMNARKEIEAWNAEVKEHQEALSEVTSRGAGFQAFLKFMEVRIAHWDALWEEYTKPRWARLQMNLYVGKQRAFASFFNQLSALKEDENQRLVVAYRAGRWAPKKGTTPAPTTGAYKECARRFVAIPIDEFRSSYTLHELGCTLQRVEMEKCQRSPEEIAKYGPLTEEQMERRAKLRGLLALVSTTSDGKERMEFLNRDFNVAINLRRCAVLETRPPELTRENFVGQPPKVELYEKIWNQYVAVTMSSGSQDTSSGQSVLKDAEAKVGSAWESTKESVSEAFTSAKETISDKYRDLTGQKSAQEKAQDKASEAVDHLKETGQSAKESLQHAADAASEKLKDG

SEQ ID NO: 4573 - protein, 927 aa, Cyanidioschyzon merolae
MGLLRFRRARYYRESGVMNARKKIPAWDAGMKDHLEALSEVTGRGAHFQASRKVMEVRVPHREALREEYTKPRWARLRMSLYGGRQRVLANFFNELNALKEDESQRLVVAYGSGRWKTQKRCTPALTTRTYIECARRFVTISIDEFRTSYTHHELGCTLQSVEIEKCQSSPEGIAKYGPLTEAQMERRAKVRGLLALVSTTNDGTERMEFVNRDFNAAIKITTCAVLESRPPELPRENVIGQPPKVELFEKKLEAVAGGRSKKAGRRLHLTFAARGASVPEMEPKPTVFNSLTREKEQITLSSDRSFLSWYICGPTVYDAAHVGHARNYVSFDIVRRLLVDYFGIPVLYQMNITDVDDKIIQKSFDSGESFTNIARRFEADFFDDLEALHCLPPDVVTRVTEYIPEITAYVRKLMERGYAYEAASGSVYFDVEAFERSGRHRFGKLRPAAAAAATSVETRPHAGANGVDPPSLEQLSVQEEKRNPRDAALWKASKSAMEPGWESNGLARGRPGWHIECAVMASLVSCAGTTHLDIHTGGIDLEFPHHDNEIAEAEAYFETDLWSRYFLHSGHLNIEGLKMSKSLKNFITIREVLRRWNWRQLRVLFLMHHYQTTMNYSEESMTHAAAVERTIQEFMRSTEAELRAHLPEERHRKPTKVDLELLYQVLPATEATVRAHLSDNFNTQDALQDLLTLIRTVNLHRHETPGGVGYATLHHIRSSVGRILSCFGLDYDVKDDVASQGGAALASVEPWIQGAVRLRDQIREVVLSADANTDANALKESILAVCDEFRDAVLPPLGVRLEDRTYPKPAIWKYDDPAAIQADIEQRRQAEAARAAEKEARRREAEQRLLKELEQGRTHPSQMFLDPSLYSQWREDGIPTHDAEGRELEKSRVKRLLKEQQRQERLHRKFLEAQASGLLSKLGMEP

SEQ ID NO: 4574 - protein, 635 aa, Cyanidioschyzon merolae
MYRDVTHMETVEIPDEFFDMTFIRQLMLVTGEARRENERMHALHEKHPFYSFNGTRYKGDGDIYTYGAMKYLTNLKNHLTANLERFMIRAVVALYQSLSRNGKWAIINGITKDRKHEDEVEVVDKKASNKSTNEDSVIRAVIQEHRAVLGLVNPTEKISELKKIRKDTIASSCEKNEEWERRKAALVGKRFSVVPLCNFKSHFVTIDSRILYGIMREIIPEFDVNREEFIGENLETYWKNIFNFKRLKMSKQKVFTGLIETDGVALCVHYRRLKKDRSVPLSASPVTKDAENKAADPATQEVEDNDLVVDAVKQEDEKEAGPATQKVQGNDFVRAEDSTDGSLRQKDMRLLRFPRARYYRESGVMNARKKIPAWDAGMKDHLEALSEVTGRGAHFQASRKVMEVRVPHREALREEYTKPRRARLRMSLYGGREPKAGSSVRSRALSAQERSYASSNDEGVQGRVEMEKCQRSPEDVKKYRPLTEEQMERRAKVRMEFVNRDFNATINIRRCAVLERRPPALTRENFVRQPLKVELYEKKLEAVIGGRSNKTGRRLRVSWRRLVEGAVAATTVHARRRSTLERRCWCVSTGFADRAASATKSHPLSAAAVKAMKSSLRRGSPRSSIKQSLASFESS

SEQ ID NO: 4575 - protein, 676 aa, Cyanidioschyzon merolae
MYREVTDVKPVEIPDEFFDKTCIRHPMLCREETRREDMLVHALHETHPFYRFESTRYRGDRDIYRYGAMKYITNLKNHLTVNLERFMLHAVFALYPGISRSGKWAIINGITYDRKHEDEVEFVDKKASKGSTNEASAIRAVIQEHRAMVSSHPALFRVSGPTARTQGRGEAEMIETDGVALCVHYGRLKADRHVPPSALPSAKHEDEKEEDPATQEVEDYEFIVDADPGNTNIITITAPKRAEDVLKIETLPRILYNQCEEKIETWNAGMKDHLEALSEVTSRGADFTAFRKVMEVRVARWDALWGKYTKPRWARLQMNLYGGKQRAFANFFNKLSAMKEDESQWLVVAYGAGRWKTQKGTTPAPTTRTYKECAWRFGTMPIDEFRTSYTHHELGCTLQRVEMEKCQRSPEDIANTTNDSKKRMEFVNRDFNAAIDIRKCAVLEQRHPELTREDFVGQPLKVELYEKKMEAVGVFVTTVHGRGRSTVVLCLFRCRGAHYPLGPRQVSLSGSWRAGAHGSNIFSLAGGRMASSDPAQDCIFCKIISGELPCYKVFSDENCTAFLDLFPATSGHTLLVPRSHHEVLETMPPEEVSAVFARVPLLGKAIKAAVGAPSYNLLVNNGREAGQVVPHVHIHIIPRKPGDGLIRHPGGGPRLEPDKAEPLLRVLKEKLGRAGP

SEQ ID NO: 4576 - protein, 557 aa, Cyanidioschyzon merolae
MIRAVFALYRGLSRKGIWAIINGITNDRNYGNEVEFVDKKESNQSTNENSVIRAVIEEHRAVLGLANPTDKISELKKDRERYDRLVLRYFVFLDRELERKAEMKLSEETNEEWERRKAFLMGKRFDVVPMCKIKSHFMTIDSGVLYGIMREICPEFDVRKTEFPGENRETYWKNIFDFKRRKVSKQKVFTGLIETERVALCIHYRRLKKDRPVPPSAASVTKNEEKEEAGPAKQEHEENEDAGPATQKVQDNDFVVGADPGNTNIITIAAPKRAEDRTDGNLRQKDMRLLRFSRARYYRESGIMNARKKIETWNSGMKEHLEAVSEVTSRGADFEAFRKFMEVRVAHWDALWEEYTKPRWARLRMNLYGGRQRAFPNFFNQLSALKEDESQRLVVAYAAGRWKTQKGTTPAPTTRTFKECARRFVTIPVDEFRTSYTHHELGCTLQRVEMEKCQRSPEDTAKHGLLTEEQMERMAKVRGLLALVSTTSDGKKRMEFVNRDFNAAINIRKCAVLEKRPPELTGENFVGQPLKVELYEKKLEAVVGGRSRKAGRRLHVR

SEQ ID NO: 4577 - protein, 322 aa, Cyanidioschyzon merolae
MLETDGATICVHYRRLKKDRPVPPSAEFSAKHEENKEANPETHKLQDDDLVVGADNELVVPADPGNTNIITIVVPKHAEDGTDGNLRQKDTRVLRFSRARNYRESGIMNARKKIETWDAGMKDQMEALSELTSRRTDVEAFRKFMEVRIAHWDARGRSRIFFNKLSALKENESQRLVVAYGAGRWASRKGTTPAPTTRVYKEFARHFVTIPVFEFRTSYTHHELGCILQRVEMEKCLRSPEDIQKHVPLTEVQLERRAKVRGPLALVSTANDGKKRMECVNPDFNAAINTGKSAVLEKRSPEWTRGNFIGQPLKVALYKKKL

SEQ ID NO: 4578 - protein, 349 aa, Cyanidioschyzon merolae
MRVLRFSRARYYRESGIMNARKKIETWNSGMKEHLEAMSELTSPGADYEAFRKFMDVRVAHWDAVWEEYKKPRCARLRMNLYGGKQRALANFFIQLSALKEDQSQRLVVSYGAGRWASKKGTTPAPTTRVYKYCAWRFVMIPVDEFRTSYAHHELGCTLQRVEIEKCQRSPEEIAKYGPLTEEPMEGRAKVRGLLALVSTKNDGKKRMEFVNRDFHAAINIRRYAVLENKPPEWTRKTFVGQPLKVELYEKKFEAVGVFGRRGRKPTPGTLTATNSGAEAVAPENMDENSEQTSAPPETTLQADTLEDGWQHVRGRSRNKRLARLCVWGADTKPLKGWFAEYSQWLRGG

SEQ ID NO: 4579 - protein, 750 aa, Cyanidioschyzon merolae
MQNVQDNDFVVGADPGNTNIITIAVPKRAEDGTEGNLRQKDMRLLRFSRARYYRESGIMNARKKIETWNSGMKERLEALSEVTSRGADYEAFRRFMEVRVAHWDALWKEYTKPSWARLRMNLYGVKQRAFANFFNQLSALKEDESQRLVVAYGAGRWKTQKGTTPAPTTRTYKECARRFASIPIDEFQTSYTHHELRCTLQRAEMEKCQTNPEDMKKYGPLTEEQMERRTKVRRLFVLVSTTDDGKKRMEFVNRDFNAVINLRRCAVLEKRSPDSTRGNFVGQPIQVELYEKKLEAVVSGWSIETGRRLSTGVMLERGTLEAAKTETPASQAVVSDHSEIDRVRVTVTSRDRPGITAAITAVVARCSCEILSVRQVCVRRRLTLMFELLVKNAFPQQSIFRELLLVSKRIGVSVDFSLQPSTEISSAEACMLQHASEQYVITAIAADSITPAFLADLGQKLQERNFVLESVNKLSQHRLGCIELVVSSPASSSSSDIQQFRSEMFVLGRKYATDVAVQKESLIRKSKRLVVMDMDSTLIQQEVIDELARYAGKFEAVQEITHRAMCGELDFRTSLYKRVECLKGTPATVFQKVIDHLVYTPGAHFLAHSLKRLGYKLAVISGGFAPIAQHVRQTLGLDYAYANQLEVGPDGCFTGRTVGPIVDGQRKADLLMAIAQQEQIDLEQTICIGDGANDLPMLSMAGLGIAFNAKPAVQERAAFRLNRQSLDSVLYFLGIPESEQIQLREHNDAS

SEQ ID NO: 4580 - protein, 283 aa, Cyanidioschyzon merolae
MKEVTPVFDVHEEEFSKVTSRGADFRAFREFMEAQAAHDCEMWKWSGKPRRARQHVNLYCGKQRAFTNFFNQLSVLKVVKSQRIVISYGAGRFVPGRRSAPAPSTRANKECAYLFIPFPIDEFRTSYVHHELRCAFQRIELEKCQQSPEQIEKYCALTEVQMERRAKVRRLLALESTINGKKRTEFVNRQFHAVITIMRCAVLETRPEELTRTISVGQLLKVALYGEKLKPVVAGRSKKAGRRLHVGGRRIVYVGRFAARHHSTPVMQRTPTETQSLLCHTIL

SEQ ID NO: 4581 - protein, 996 aa, Cyanidioschyzon merolae
MEARVAHWDALWEEYTKPRWASLRMNLYCGKRRAFANVFNQLNALKEDESQRLVEAYRAGRWKTQKRTTPAPTTRTYKECAQRFVTIPIDEFRTSYTHHELGCTLQRVEMEKCQRSPEDIKKYGQLTEEQMERRAQVRGLLALVSITTNGKKRMEFVNRDFNAALNIRTCVVLQTRPPEWTRENFVGQPLKVELYEQKLEAVTGVCCVTVSGNWSTCTLMEPFGRDSGKLVWIHDLEQEDAEPVLAQRALSPHWRRLVQSSVAAGERSDERARDALLVPVTDPLRAQEASTSGDRSDGTQLVHNTASVDEATLTALQTLELRRELGQAFRSLRSAVTERGFQRVLITNEVELNADERRVCALLRNAIALREKYLYLPEVPEYANPAPPYRDCDLSIHVPPPYDPFRGPALAKGDYAFEVRDGIMEVTRPATETSREPCKFVVPGSYALFVHDLNTLIGIMNDPDSRSFCYRRLQLLSLRFQMHLLLNDEAERLEQMTVPHRDFYNVRKVDTHIHHSSCMNQKHLLRFIKKKLKTEPNTPVIERDGRVLTLAGVFDSLGITAYELSVDTLDVHADKRTVQRFDRFNNKYSPLGESRLREVFLKTDNFIEGRFLAEITREVLDDLVESKYSHIEPRISIYGKKRCEWDRLARWFTKHRIYSDHARWLIQIPRLFGAYHEAGLLESFQEMLNNIFFPLFEVTQDPSTHPELHTVLQQIVGFDTVDDESVPQPRIDLLTLPPPLAWRTSAPMPYAYFTYYIYANLWVLNRFREHRGLHTFRFRPHAGEAGEIDHLAVTFLLAHGINHGINLKKAPVLQYLYYLCQVGLAVSPLGNNLLFVDYTKSPVPVFIARGLNVSLSTDDPLMFHFSREPLMEEYSVAAQIWKLSSSDLCELARNSALQSGFEPCVKAHWLGPRWFLTNDQGNDIHKSNVPSIRVRYRYETLLNELTLVFRQASGASCTHPEPGGSLSSVVSSRVLPTFAQFYYERHMRRQGPAENR

SEQ ID NO: 4582 - protein, 515 aa, Cyanidioschyzon merolae
MKDRKREDEVEFVEKKASNESTNEASVIRAVIQEHRAVLGLVNPAEKVSELKKDKERYCLLILRYFVFLDRELERKAEMKLSEENNEEWERRKAFLMGRRFNLVPMCNIKSHFVTVDSRILYGIMKGISPEFNVSREEFSGENRETSWKSLFDFKRLKASKQKVLTGLIETDGVALCIHYRRLKRDRPVLPSAAPATKDEDKKEAAPVTQEVEDSDFLVDAAKDEDKKEAAPATQEVEHNDLVVDADPGNTNIITIALPRRVEDDTDGNLRQKDMRILSFSRARYDRESEIMNARKKTETWNAGMKEHLEALSEVTSRGADFEAFWKFMEVRMAHWDALWKEYTKPRWARLRMNLYCGKQRAFANLFNELSALKEDGSQRLVVAYGAGRWASKKGTTPAPTTRVHKECARRFVTIPVDEFRTSNTNHELGCTPQRVEMEKCQRSPEEFANYGPLTEEQMERRAKVRGLLALLSTTNDGKKRMEFVNLDFNAAINVRRCAVLESRPPEWTRENFFG

SEQ ID NO: 4583 - protein, 372 aa, Cyanidioschyzon merolae
MCVRYRRLKADRPVPPSAAPVTKHEDEKVADPAMQKVHGDDFAVGVNPGNTNIITIAVPKRAEDGTAGNLRQKDMRLLRFSRARYYRESGTRNARKKTETWNSGMKDHLEALSEVTSRGADFDAFREFSEVRAAHWEALWKEYTKPRCARLRMNLCCGRQRAFANFFSPLSALKEDESQRLVVAYGAGRWKTQNGCTPARTTRTYIECARRFVTIPVDEFRTSYTHHELGCTPQRVDMEKCQRSPEDIAKYGRLTDDQMERRAKMRRLLESVSTINDKKLMEFVNRDFNAASNIRRCAVMAKRAPELTRVNFVGQPLRAELYKGKLKPFVWGRSRRSPLLCTGYAAFDAWKAFAAAAAAAAGGGGGQGRSFG

SEQ ID NO: 4584 - protein, 790 aa, Cyanidioschyzon merolae
MQEVEDNDLVVDATKHEDNNKAAPATQKVQDIDFVVGADPGNTNIITIAAPKCAEDGTDGSLRQKDMRLLRFSRARYYRESGIMNAGKKIESWNSGMKDHLEALSEVTSQGADFEAFRESMEGPRCSLGYAVGRVHQAPVGSSAQRLVVAYGAERWASKKGTTPAPSTRTYKECARRFATIPVDEFRTSYTHHELGCTHHRVGMEKCQRSPEDIKKYGALMEGQMERRAKFRGLLALVSTLNDGKKRMEFVNRDFHAVINVRCAVMEKRPPDWTRENFVGQPTKVELYKKKLEAVVGGRSKKLGGVCTSGGDDLSKARSPPLLNTVGGRASHRRRPCELQPSIHSFLTSFISAGDYDTARAYAADKMFVPIIYTACRVAGVCARSRISSVRTRCDVFWGAPLNRFGLRRASLPGRAVLRMDTWTMASAELPEEKMEPTVNSDSTPAGGSEGVSKLDAGVAAESTPFTTAEPMSADAQEGMFSQEMRFGPDSYRRRTRREGSGPRRTPSASRRTASTMRRRPLTYKLTDLQPGQELRGTVCGVVSYGAFVDCGVFYEVDNAEDSSSSFYASSDGLAETSAQGASELNAMEQEAASADTAGALPNTWGERKKFIPFDGLVHIRDFSREYVENPESFVTRGDEVTVYVKFIDLEKRRLSLSFLPPGQQRSQGRNTSSARNLYTPTETADGRRILVYADSENRRRVGSYQLDETVEGTVRRVTNFGAFVDIGSEVDAFVHVSDLWGQNKQRTLQSIKPGDKFTAQICEINDRAKRIRVRDAEPVSNEHGTEETE

SEQ ID NO: 4585 - protein, 215 aa, Cyanidioschyzon merolae
MRLLRFSRARYHRESVVVNARMIIVTWNAGIKHHLEALSEATSRGAVYEAFRKFMEFRVAHWDALWEEYKKPRWARLRMNLYGVKQRAFANFFNQLSAFEGDDRQRLVVAYGAGRWKNRKGTTPAPATKLYKECARRLVTIPVYEFRTSYTYQELGCTLQRVEMEKCQKSAEEIAKVRTAGGGATVKEGESSRVTRIGEYSSQRHEMYGVREPRF

SEQ ID NO: 4586 - protein, 305 aa, Cyanidioschyzon merolae
MEETCPQFDGRKTEFTGESRETYWKNIFYFKRRKVSKQRVFTGIIETDGVSMCVHCRRLKADRPIVPSASPVTKHEEKKEADPATQEVHESDFVVGVDPGNTMNIAVAAPKRAEDGSDGDLRQKDMRLFKLSRARYHRESGIMNARKKIETWNAGIKDHLEVMGEVASRGADFKAFREFVKIRVAHWGALWKEYAKPRWARLRMNLYCGKQRAFANFFNQLRALKEAESQRLVVAYGAGRRKTHKGTTPAPRTRAYKECAPRFDTIPVDEFRTSYTHHELGVYASESWDGKAPAELRGYGKSTEP

SEQ ID NO: 4587 - protein, 572 aa, Cyanidioschyzon merolae
MKTSRRCLSEASVIRAAIQEHRAVLALANRAEKVPDMKRDEERCYRPIVRYFGFLNRKLERKAEMEPSQKANEEPERQKAALLGKRFYVAPLCSIKSHYVIIDSRVLYGVMEETCPQFDGRKTEFTGESRETYWKNIFYFKRRKVSKQRVFTGTIETDGVSMCAHCRRLKADRPIVPSASPLTKHEEKKEADPATQEVHESDFVVGVDPGNTMNIAVAAPKRAEDGSDGDLRQKDMRLFKLSRARYCRESGIKNARKKVETWNAGANEHLEAMSEVTSRGADFRTFLKFTKVRVADWEAPWKEYAKPRWARLRVNLYCGKQRATADFFNQALDDPESVSTSAVNKNIQGVRRRFVTIPIDEFRKSPIHDELGCTLQRMGMKKCQRSPEDIQKYGALTEEHMGRKAKVSGLGASGSTINSKKRMKFVNQDFNAAINIRRCAVIERRPPELTRENFAEEPLKVELYEKKLKPLGGRFSARHYISSTMPDDIAPRPLQIARTVVNTSTSVAVGQPASADSTPVWNGCSSVCMCMCLCSWRSHWGGAKVARVSSEMEPAVGEAGCAPRDIPRKRIA

SEQ ID NO: 4588 - protein, 513 aa, Cyanidioschyzon merolae
MWAIIDGITNDRQNVQEIEFVDKKTSRRCLNEASVIRAAIQEHRAVLALANRAEKVPDMKRDEERCYRPIVRYFGFLNRKLERKAEMEPSQKANEEPERQKAALLGKRFYVAPLCSIKSHYVIIDSRVLYGVMEETCPQFDGRKTEFTGESRETYWKNIFYFKRRKVSKQRVFTGTIETDGVSMCAHCRRLKADRPIVPSASPVTKHEDEKEADPATQNVHESDFVVGVDPGNTMNIAVAAPKRAEDGSDGDLRQKDMRLFKLSRARYCRESGIMNARKKVETWNAGANEHLEAMSEVTSRGADFRTFLKFTKVRVADWEAPWKEYAKPRWARLRVNLYCGKQRATADFFNQALDDPESVSTSAVNKNIQGVRRRFVTIPIDEFRKSPIHDELGCTLQRVEMEKCPRSPEDIQKYGALTEEHMGRKAKVSGLGASGSTINSKKRMKFVNQDFNAAINVRRCAVIERRPPELTRENFAEEPLKVELYEKKLKPLFCLGRVRRHYCKPLATAFDF

SEQ ID NO: 4589 - protein, 854 aa, Cyanidioschyzon merolae
MCVLYRRLKRDRPGPSSILSLVKHEDKKDADPATQEVEDNDFVIGADPGNTNIIAVAVPKRAENGIDGKLRQKDMRLLRFSRARYYRESGIMNARKIETWTAGLRDHLEAMREITSRGADFQAFRKFMEVLVAHWGALWEEYTKPRWARLRMNLYCGKQRAFANFFNQLSALKEDERQRLSVAYGAGRWKTQKGTAPAPTTRTYKECARRFVTIPVDEFRTTFTHHVLGCTLQRVEIEKCQPSPADMKKYGAMTEEQIERKANVRGLLSCIRGCAVQEKRPPEWTRRNLVGQCFQVELYEKKLEAVVGGRSKKTRRRLHVSSRRFGSDAFTAILPHYRRRSTLRAFFVFQLTLDFLHCTYFFLAKERFTRNSGRSVDNRRTLGRRARSQNPAARTVFLPSMLMTPERSVAADNATENVVPEEIEHGERVTDLRGRIGRYRSSVPDARGKFGPFGGKFVPETLISCLEELEEAYKKVSKDPTFQQELAQQLRDFAGRPTPLYFAERLTAHFARPDGSGMQIYLKREDLLHTGAHKINNALGQVLLARRMGRTRIIAETGAGQHGVATATVCARFGLPCVVYMGARDMERQKLNVFRMRLLGAEVRPVHTGTATLKDALSDAIRDWVTNPSTTHYVVGSVAGPHPYPAMVRDFHYVIGEEVYQQVQERHGPGRLPDILVACVGGGSNAIGLFRRFVDEPSVRFIGVEAAGRGLDTHEHAATLTKGSVGVLHGSMSYLLQDDDGQIVEAHSISAGLDYPGVGPEHAFMRDTGRAEYLSVTDEEALDAFQLVSGLEGILPALETSHAFAALKRINDTIPAGARPIVVVNCSGRGDKDVNTVITALKERNSPLVSGLDI

SEQ ID NO: 4590 - protein, 350 aa, Cyanidioschyzon merolae
MKKRRRAGPVTEKVQDNDFVGGADPGNTNITTIAAPKRAEDGADGNLRQKDMRLMRFSRARYYRESGIMNARKKIETWNSGMKDHLEALGEMTSRGADFEAFRKFMEVRVAHWDALWEEYTKPRWARLRMNLYCGKQQAFANFFNQLSALKEDKTQRLVVAYAAGRWKIQKGCTPAPTTRLYKECTRRFVTIPVDEFRTSYTHHELGCTLQRVEMEKCQRSPEDIAKYGLLTEEQMERRAKVRGLFALVSATSDGKKRMEFVNRDSNAAINIRRCAVLEERPPDWTSANFAGQSLKVELYEKKGSSSGGRSKKTRTSAHWLMTTSLGRASRHYCTAGVVRISNGVRIDKS

SEQ ID NO: 4591 - protein, 591 aa, Cyanidioschyzon merolae
MEVRVAHWDALWKEYTMPRWARLRMSLYGERQRAFANVFNQMSALKEDKKSQRLVVAYGAGRWKTQKGTTPAPTTSAYKECARRFVTIPVGEFRTSYTHHELGCLLQRVEVGMCMRSPEDKKIRTADGGADGKDGESSRIACIGEYQQWRETRCAVMEKKPPQLSRENFKGQPLKVGLYEKKLEAVSKAEHSPLLYTTGGHNVFLLGDVCCWCRRCVWNRFPEKTAVRLRPAADAPEACRFTQETTGITSYAKLRVLDRFRSRDGLETLVLSARGPLDRRTVEQAAATWCAPGGVLPPRLDPQNEVLILQCKPDADAFEGTAPNEQLHLAAWTMLRLRPESQENRRPNNVERSVSQSLLLSWIIHHTRVGIRNFFIYLNEPDACGSRIMELRDELTERLADVPANVSIIAWPFRPPKGVHWNHVQIAAMNDCLWRNRGIFKWILFADVDEYIVPSENALRSNPESPVLHVLDDIERQLPINLCSVRVPCWWRYDVIEPALNWSEASQTSLRRPWLGAAAPVDRVCKPHLNREKCFVRTDQVYYTAVHAVAEAYGPNCVQVWPDVHQHLRLEHRRSPRAFDDYSPAEVLYAT

SEQ ID NO: 4592 - protein, 522 aa, Cyanidioschyzon merolae
MHLASEVYREVTHMETVEIPDEFFDKTFIRHLMLGTEEARRENELVHALHENMPFIASRYLTNLKNQPIVNLELFMIHAVLALYSGISRKGKWAIISGIKNDRKSTNEASIIRAARQEHRTVLGLANPTEKISELKKDKERYYRLILRYVVFLDRELERKAEMKLSVETNEEWERREAVLMGEISPEFNVSREEFSGEARETYWKNIFAFKRLKVSKQKVFTGLIETDGVALNVHYQRLKKDRPVPPSAAPVQDNDLVFDAVKDEEKKEADPATQKVQHNYFVVGADAGNTNIITIAAPKCAEDGTDGSLRREDMRLLRFSIARYYRESGIMNARKKIESWNSGMKDHLEALSEVTSRGADFDAFRKFMEVRIAHWDALWEEYTERRWARLRMNLYNGKQRAFANFFDELSALKEDESQRLVLAYGAGRWKTHKGTTPAPKTRVNKERARRFVTVPVDEFQTTYIRHELGCTLQRVEMGKCQRSPEEIAKNGALTEEQMERMEKVRGPLALVSTANDGKKRI

SEQ ID NO: 4593 - protein, 445 aa, Cyanidioschyzon merolae
MKYLMGLKNHMIVSLSRFVIRDAFALYPGLSRKGIWAIINGITNDGQNEDEIEFVDKKTSSRRKNEDPAIRAVIQGHRAVLGPANPAEKISELIKDEERYHRLILRYFAFLDRELERKAEMKLTLHRRFAVQHQVIICDYRLRTPLRTDHPFPPPVSPVTKEEEKKEADPAMQKVQDNDFLVGAHPGNTNIITIAVPRRAEDGTDGNLLQKDMRFLRFSRARFYRESGIMNATKKIETWNAGMKDHVEALSEVTSRGADFTAFLKFMEVRVAHWDALPEKYTKPRWARLRMNLYCGKQRAFANFFNQLSALKEDESQRLVVAYGAVRWKTQRGCTPVPTTRSYKECARRFVTIPIDEFRTSYTHHELGCTLQRVEMEKCQRSPEDIKKYGPLTEELMERRAKVRGLLALVSTTINGKNRFEFVNRDSNAAINIWKCAVMDPKPTE

SEQ ID NO: 4594 - protein, 259 aa, Cyanidioschyzon merolae
MCVHDRRLKKDRPVPPSAAPITKDEEKEQADPVTQEVQDNDFVVCADPGNTNIITIAAPKRAEDGTDGNLRQKDMRLLRFSRARYYRESGIMNARKRIAAWNSGMKDHLEALSEVTSRGADFEAFRKFMEVRIAHWDALWEEYTKPRWARLRMNLYGGKQRAFANFFNELSALKEDESQRPVVAYGAGRWKTQKGTTPAPKTRVYKECARRFVTLPVDEFRTSHTHHELDCTLQRVEMEKCQRSTEEIPKYGALTEEQM

SEQ ID NO: 4595 - protein, 1589 aa, Cyanidioschyzon merolae
MSECMPSTRITPNTAAAVLDTEVTRVGLRLRGNEVPHEPEEADDHERQTLHGTRRLCAVPGSRSEREMSHDQWRRERERRNEASVIRAAIRKHLAVLGLANSQEKISNMEKYGKGSYTLILHYLVFLDRDLERKTGKDVGAGKNEESEKRKAALLGKHFNVLPLCNIKSRVVTIDSRILYGIMKEICPEFDDKRNVLTGMIERDGVAIYVHNRRLETDRTGPSSISPMTKHEEKKQVYPTTQEVHENDIVDGADPGNTNIITIAVPKLAEDGMQEHLEAMNQMTSRGADFQACQEFMEVRVAHWDALWNEYAKPRWARLRMNLYCGKPRAFANFFNELSAFKEDESQRLVVACGTGRWMTQKGCPPAPTTRAYKECARRLVTIPVDEFRTSYTHHELGCTLQSVQIEKCQRSPVDISKYGALTKQSPEGMAKDRGLITSDSTTNDGKKRMEFVNRDFNVAINIRRCAVMERRPPELTRANFVGEPLQVEFYGNKLKPVVDGRSKKDREASAHQLETYDLGRAARHYCILIFKLSTIESLSRRSRTAREQQGNGTHIPDGNKSTSTPSEEVRTGAAADAREDTAFPSAEGQRPADSRRKRVKSCNISMKDYEDPHQIAKFEAISAQLNAEPPEQLGFRPGDSVDVSPRALSLLTGNLLQFQERVLGRNSVEPPEIRGFMTKLPNRLFHDYSAHGSLRTILECCFRFRVARGIRRFDLHKPDMTGVFLEMLQEVERELIKRKQLQMPRLFFAPALGSAEIDRLSAIARKHGASVVSSPREATHIVYPDPPGTTEAETEAEDYCVSLKRKGNQVLTHWWYFPDSYDSWIPAQEVEDPDGELHGEEENLSGVIEGKIWHVQKRFLEDCEKFNEWCNENDYEVIPEEEKLNVDEWKPPSASRIDGHLRGSESKTAAPTPSKRKSAEPSPVKPEPDGTPERVTVRAVREESAEPMKIKVRLAPPIASQDAGSSSNAPAEQVPAPNIAGPITFTTETGAAVDAEQPSAAAGAAPRISRPAVRPLVPDDATLRMRNVTASSRDEQLQKRLAQQREALRERRKERNDAAAAEEDALPGPAAHAPRDRESLAPRRVAEALGGLAERETLPAAAAATAIGEKSPIRVPAHSRWFRIDAIHDIERRALPEFFSGKFASKTPEVYMLYRNFMIDTWRQDPTRYLTGTAVRRHLAGDVGAVMRVHAFLEQWGLINYGVAPETRPQTVSGGFSGSGATLISTSSGSLAASSAGLEGGLPRIFLFDDGSRIPKSRMHLAPMATRRELYAAAAAIEYQCDVCGRDCSQRRYHCLLKADMDLCPECYHQGKFPEDFNGKDFIELRPVLSLGSAASATGTLTAPSTDDWTDVEVLQLLEGIEAYGDDWDAVAQHVGTRSRDACITKFIRLPIEDPFLEDDLSRLAVPAVAGETAQTERNEPPLFADAGNPLMAHIAFLANSVSPDVAAAAARAALAAIMKSDAPPEALADANAIQAVAATALGAAATRAAELAAIEHLELHRATEQAIETQVRKLEEKMKVLEQLEEEFLREREQVEIYRKELFAERLNLVARREALSSTATLGASPATALNASIPEWTVARDTRKQC

SEQ ID NO: 4596 - protein, 251 aa, Cyanidioschyzon merolae
MQKVHDDDFVVGADPGNTNIITIAIPKLAEDGTDGNVRQKDMRLLRFSRARCYRESGIMNARKKIETWNSGMKDHLEAMSEVTSRGADFEVFRKFMEVRVAHWDALWEEYTKPRWARLRMNLHGGRQRAFANFFNQLSALKEDENQRLVVAYGAGRWKTQKGTTPAPTTRTYKECARRFVTIPVDEFRTSYTHHELGRTLQGVEMEKCQRSPEDIKKYGPLTEEQMERRAKVRGLLALISTTNDGKKRMEL

SEQ ID NO: 4597 - protein, 920 aa, Cyanidioschyzon merolae
MKRAVFAPYPGISCNGKWAIIHGITNDRKYEDEIEFVDKKASKESTKEASAIRAVLQEHRARLGLANPTGKVSELKKDKERYYRLILRYFVLLDRELEREAEMKLSEETNEEWERRKAFLTGKRVNVVPLGNIKSHFVTIDSAVLHGIMREISPEFDVSREEFSGENRETYWMSIFDFKRPKVSKKKVFTGSIETDGVALCVHYRRLKKVRPTPPSAAPVMKDEENKEEVPVTQEEQDDDLVVGVTKDEENKEEDPVTQEEQDNDFVVGVTKDEDEKEASPATQEVENNDFMVDATKHEEKKEADPATHKVQDNDFVVGADPGNTSIINIAAPKRAEDGTDGNLRQKDMRLLRFSRARYYRESGIINARKKIETWNSGMKEHLEASSEVTSRGADFEAFRKFTEVRVAHWEAPWEEYTKPRWARWRMNLYCGKQRAFANFFNQLSALKENQSERLVVTYGAGRWMTQKGTTPAPTTRTYKECARRFVTIPVDEFRTSYTHHELYGPLTEEQMERRAKFRGLLALVSTTSDGTKRMEFVNRDFHAAVNIRRCTVLEKRPPEWTRENFVGQPLKVELYEKKLEAIIGGRSRKAGTHLHLDDTHDLLNMGDAGSGSKESDSALRRGGDVSGGKAAPVNGAVAASESDNASSSSAALRNSSASFREGPPGRPPLLSQRFTVARQHLPGQLHEILMWRNKYRSGLAFALGNLFFYFTTFGELSIITVFSMIVFWIVLLASPVPGASPVGTTAPTRRLLNRETAERLTESTMKTVNGLENLLRDAAHCRDWQLTVKVLLGSYLIGKLGPLFLNMYMGWLIFLSVMTLPKVYEWKQRDIDDLIREIQPVLQSKLYEAEALIKNHISSVLSQIPPKVHEYSEMLRAQLRALTGASDRARSSSSRPPFSAGTSAATSSSMTTSAETKED

SEQ ID NO: 4598 - protein, 218 aa, Cyanidioschyzon merolae
MQKVQDNDFVVGADPGNTNIITIAAPKRAENGTDGNLRQKDMRLLRLSGARHYRESCIMNARKKIESWNSGMKDHLGALSEVTSRGADFEAFRKFMEVRVAHWNAPWEEYTKPRWAHLRMNLCCGKQRAFANFFNQLSAANRDEERLEMEKCQTSPEDIQKYGALTEEQMEGRAKVRWLLALVSTTSDGTKHMEFVNRDFNAAINIRKCAVLETRPPE

SEQ ID NO: 4599 - protein, 1287 aa, Cyanidioschyzon merolae
MAQEKCSTSDERVHALHEKHPFYRFEGTLNKVDWDIYTFGAKKYLTNVKNHFTMNLERFMICAVFALYPGISRNGKWAIINGIMKDRKHEDEIKFVEKKVSNESMNEDSVIRAVIKEHRAILGLANPTDKISELKKDRERYDRLVLRYFVFLDRELERKAEMKLSEETKEEWERRKAVLMRKRFNVVPMCKIKSHFVTIDSGVLYGIMRDICPEFDVSREDFTGGNRETYWMSSFDFKRLKVSTKKVFTGLIETDGVATCVLCRRLKKDRPVPPSAAPVTKHEEKKEADAVMQEVQDNDLVVDVMKDEDGKEADPVVQEVQANDFVVGAAMHKDEKEGDPAAQKVHDNDFVVGADLGNTNIITIAVPKRLEDGTDGGMRQKDMRLLKFSRAIYYRESGIMNARKKIETWNPGMKEHLEALSKVTSRGADFEAVRKFMEVRMAHWDALWEEYTKPRWARLRMNLYGGRQRAFANFLNELSALKEEESQRLVVADGAGRWVPKKGTTPAPTTRMYKECARRFVTIPVDEFRTSYTHHEQGLTLQRVEMEKCQRSPEDIAKYRQLTEEQMERRAKVRGLLALVSTTPNGTKRMDFVNRDFITAINIRRCAVLENRPPEMTRENFVGQPLKVLLYETQLEAVVGGRSKKPRKRLHVSRRLVVQGAPVATTVHRRRRSTLERRSAVCAMRDTSWPQRLQSVTWRTVRQRFRVWLSTACSRSSTGGGGAFAEHPHDVGTGGSVNGSVTTNRDLDSASTEAGATDQIVASGLASVLGVGERTYQEEVFALCGGGRARVRRQHAQGKLTARERLYLLLDRGSFQELDRLVSSRESLHASSSDPLGKHRTPGDGVVSGFGRIHGRPVFVYSQDFTVAGGSLSEANAAKICKVIDKAIEVGAPVVALCDSGGARIQEGVRSLAGYAEVFKRNVLASGYIPQLSLILGPCAGGAVYSPALTDFVLMSRRHARMFVTGPSVTNAALGEQTTDEALGGAAVHCRISGVAHLDADDDIAVIQLARELLSYLPQNARVPAPQVVVTEDPSDREEPVLDRLVPSDAHTPYDMRDVLMRLVDDEEFLEIQTDFAPNMLTAFARLNGRSVALIANQPLCIAGAIDSDAAVKAARFVRFADAFGIPIVTLVDVPGFLPGTQQEHGGIIRHGSKLLYAYTEATVPKLTIILRKAYGGAYCVMASKHLRGDLNATWPCAHIAVMGRAAASQILRRRVASTDALETSGDTEASEESSVSVALQRGYVDAVVRPRLTRRWLIHGLSLLASKETAALREPWPPKKHGNIPL

SEQ ID NO: 4600 - protein, 1310 aa, Cyanidioschyzon merolae
MNQMTSRGADFQACQEFMEVRVAHWDALWNEYAKPRWARLRMNLYCGKPRAFANFFNELSAFKEDESQRLVVACGAGRWMTQKGCPPAPTTRAYKECTRRLVTIPVDEFRTSYTHHELGCILQSVQIEKCQRSPVDISKYGALTKQSPEGRAKDRGLIALVSTTNDGKKRMEFVNRDFNVAINIRRCAVMERRPPELTRANFVGEPLQAEFYGNKLKPVVDGRSKKDREASAHQLETYDLGRAARHYCILIFKLSTFESLSRRSRTAREQQGNGTHIPDGNKSTSTPSEEVRTGAAADAREDTAFPSAEGQRPADSRRKRVKSCNISMKDYEDPHQIAKFEAISAQLNAESPEQLGFRPGDSVDVSPRALSLLTGNLLQFQERVLGRNSVEPPEIRGFMTKLPNRLFHDYSAHGSLRTIIECCFRFRVARGIRRFDLHKPDMTGVFLEMLQEVERELIKRKQLQMPRLFFAPALGSAEIDRLSAIARKHGASVVSSPREATHIVYPDPPGTTEAETEAEDYCVSLKRKGNQVLTHWWYFPDSYDSWIPAQEVEDPDGELHGEEENLSGVIEGKIWHVQKRFLEDCEKFNEWCNENDYEVIPEEEKLNVDEWKPPSASRIDGHLRGSESKTAAPTPSKRKSAEPSPVKPEPDGTPERVTVRAVREESAEPMKIKVRLAPPIASQDAGSSSNAPAEQVPAPNIAGPITFTTETCAAVDAEQPSAAAGAAPRISRPTVRPLVPDDATLRMRNVTASSRDEQLQKRLAQQREALRERRKERNDAAAAEEDALPGPAAHAPRDRESLAPRRVAEALGGLAERETLPAAAAATAIGEKSPIRVPAHSRWFRIDAIHDIERRALPEFFSGKFASKTPEVYMLYRNFMIDTWRQDPTRYLTGTAVRRHLAGDVGAVMRVHAFLEQWGLINYGVAPETRPQTVSGGFSGSGATLISTSSGSLAASSAGLEGGLPRIFLFDDGSRIPKSRMHLAPMATRRELYAAAAAIEYQCDVCGRDCSQRRYHCLLKADMDLCPECYHQGKFPEDFNGKDFIELRPVLSLGSAASATGTLTAPSTDDWTDVEVLQLLEGIEAYGDDWDAVAQHVGTRSRDACITKFIRLPIEDPFLEDDLSRLAVPAVAGETVQTERNEPPLFADAGNPLMAHIAFLANSVSPDVAAAAARAALAAIMKSDAPPEALADANAIQAVAATALGAAATRAAELAAIEHLELHRATEQAIETQVRKLEEKMNVLEQLEEEFLREREQVEIYRKELFAERLNLVARREALSSTATLGASPATALNASIPEWTVARDTRKQC

SEQ ID NO: 4601 - protein, 620 aa, Cyanidioschyzon merolae
MGKRFNAVPLYNIKSHFVTIGSGVLYGIMKEISPEFNVSREDFTGENRKTYWKNIFNFKRLRVSEQKLFTGMIETDGVALCVHYRRLKKDRSVPPSAAPVTKDEENKEEDPAMQEVEDNDFVVDEAKHEEKKEAGPATQKVHEDDFVFGADPGNTNFIAVAVPKRAEDGTDGNLRQKDMRLLRFSRARYYRESGMMNERKKFEKWNPGVKDHLEAMSEASSRGANFKAFREFMEVRVAHWDALWKEKRAFANFFNELSALKEDDSQRLVVAFGAGRWAPKKGTMPAPAKRPYKEYARCFVTIPIDVFRKSYTHHKLGCTLQRAEMEKCQRNPEEIKKYGPLTEEQMERRAKVRERLALVSRTDGKKRMEFVNRDFNAAFSIRRCAVMEKRPPGPTKGNFVEQSLKVEVYEKKLESLAFCGVMATKSFGVSGTKLLMGFVQLHRGAGQLETAWGRFRNFSAACSRQQHIVHHHGTFSPRARGLRLYSAISSQTPSGNSHPDFQPQRKQQPSDADWADVMERIERDVMSSKVVLYMKGEPEAPLCGFSYKAVSILKAMGVPFQSYNVLADPLLREAIKKYSQWPTIPQLFVDGEFIGGSDIMESMYRSGELKQILGVYGKAT

SEQ ID NO: 4602 - protein, 417 aa, Cyanidioschyzon merolae
MQEHRAERYYRLVPRHVVFLDRELERKAEVKLGEENNEEWEKRNAVLMAKRFNVVPMCKIKSHFMTIDFGVLYGIMKEISPEFNVSREELSGENRDTYSKKNIFYFKRLKVSKQKVFAGLIEIDGVVMCVHYRRLTKDRPVPPSAAPSTKHEENEQADPATEKVRGTDFDVGTDPGNANIISIAEPKRAVRKMVLTNSGMKEHLEALSEVTSRGADFEAFLKFVEVRVAHWDALWKEYTKPSWARLRMNLYGGRQRAIANFFNQLSALKENESQKLVVAYGAGRWKTQKGCMPAPTTRVNKECARRFITIPVDEFRTSYTHHELGCTFQRVELEKCQWSPEEIAKYGLLTEEQRERRAKVQGLLALVSTTSDGKKRMEFVNRDFNAALHIRRCAVLEENPQSRQEGILMENLSSRTI

SEQ ID NO: 4603 - protein, 373 aa, Cyanidioschyzon merolae
MGRRVNVVPMCNIKSHFVSIDSRTLHGIMREISPEFDATMEEFSGEARETYGKKSIFYFKRLKVSKQKVFAGMVETDGVAMCVHYWRLKMDRPIVPFASPSAKHEEIKEADPATQEVQDNDFVVGADPANTNSITIVAPKRAEDGIDGSLRESDMRLLRFSRTRYYRESGAPESFERADDPMSRLSSFSEIHGSSRCSLGGALERISKAHVGSIANFSALKEDQSQKLVVACRAGRWAPKKGTTPAPTTRIYKDCARRFARIPVHKFRTSYTIHELGCTLQRAEREKCQRSPEDIKTYGALTEEQMERWAIVRGLLALESTTSNGKKRMEFVNRDVYGAININKCAVMERRPHNGQERTLLDNLPMLNYMRHD

SEQ ID NO: 4604 - protein, 499 aa, Cyanidioschyzon merolae
MHLAREMYRDVTQMETVEIPDDFFDKTFLRQLMLGTGESRRETQLGHALHENFAEFHFEGNRYRGDWRIYKYRAMKYLTNLKNYLTTNLERFVIRAVVALYPGLSRKRIWAIIDGITKDRKHEDEVEFVDKKASKVRTNEASLIRAAIQEHRAVLGLVTPTDKISELKKDKERYYRLVLRRKNEEWERRKAVLMGKRFNGVPVCNLKSHFQGGVLRRKPGDPLEEYLRFQTSESEQANDPGNTNIITIAAPKRAELGIDGNLRQKDMRLLGFSRARYYRESGMMNARKKIETWNSGMKDHLEALSEVMSRGADFRAFREFMEVRVTHWDALWEEYTKLRWARLRKNLYGGKQRAFANFFSQLSALKEDESQRLVVAYGAGRWAPKKGTAPAPTTRSYKECAWRFVTIPVDEFRTSYTHHELGCTLQRVEIEKCQRSPEEIAKYGPLTEEQMGRKAKVRGLHALGSTTHNGKKRMEFLNRDFNVAMNIRRCAVLETRPPA

SEQ ID NO: 4605 - protein, 604 aa, Cyanidioschyzon merolae
MKDFSPEFNVSRKESTGENRETYWKNMFDFTRLKVGKQKVFTGVIETDGVAMCIHYRRLKADRPVPSSIVSVTKHEDEKEADCATQKVQDNNFVVGADPGITNIVTIAAPKRAEDGNDGNTRQKGMRLLRFSRARYHRGSGVMNARKKIITWNSGMKEHLEALSEVTSRGADFNAFREIMEVRVAHWDSLWEEYTKPRRARLLMNLYCGKRLAFANFFSQLSALKEDESQRLVVAYRAGRWASKKGTTPTPTTRTYKECARRFATIPVDEFRTSYTNHELGCTPQTVEMEKCQRSPEDIQKYGPLTEEHMGRRAKVRGLLALMSTTNDSKKRMEFVNHDLNAAINIKRCAVLEKRPPNWTRMNFIGQPLKVKLYEKKLEAVSGARRSPLLYHWRQRFSFERRWFPGARATATPLVRLLGMTADAAWPALVVSFLLGLFAGRRSKHQRTGASGLDTSASGAPAGSVIDSTPADAPFASLVPLASAPSGTTADVKLMLIVRRDLKMSPGKIAAQCGHASVGAFRGCTDRALLAAWDRNGQPKIALRCSSLKELLAIERAARQLRIPTFAVRDAGRTQVVAGTITVLAVGPAESAKLQRITGHLKLL

SEQ ID NO: 4606 - protein, 552 aa, Cyanidioschyzon merolae
MIEPDGVAMCVHYRRLKADRSVPPSASSVRKDEDKKTADPATQKVQDNHVIVYAAKHEEKKEAEPATQKVRDSDFVVGADPGNTNIITIVAPKREEDGTDGNLRQKDVHLLRFSRAIYYRESDIVNARKKIETWNAGMKDRLETLSEVTSRGADFKALREFIEFRVAHWDALWDEYTKSRWARLRMNLYCGKRRAFANSFNQLSALKEDDRQGLVVAYGARRWKTQKGCTPAPTTRAYKECARRFVTIPIDEFRTSYTHHELGCTLQRVAMEKCQRSPEEIAKYGQLAEEQMERRAKVRGLLPLVSTINGTKRMEFVNRDLNAAINVRRCAVLEKRPPESTTMNFIGQPLKVDLYEKKLEAVVGRVSLLYCKRSASFYFRTAFGERFDAIMDAVGLWLLLGGGVFVLGALRLMGNHVENPAVQPPPRHHERPAPRAFTGEELAQYNGTKGQPIYVAVQPRPGARAEVFDVSDARSFYGPGGPYFVFAGKNASRGLAKMSTEPGEVCGAIDDLTEHEKETLYQWFEKFLQKYEVVGHLREDPSGSGSSTNCTA

SEQ ID NO: 4607 - protein, 1386 aa, Cyanidioschyzon merolae
MIRSIFAFFPGLSRKRTWAIIDVSMNDRRNEEEIEIVGKKTPRKRKNEASVIRATIHEHRAVLGLVNPTEKVTDTKKTLSPHPALFRPPEPRARTQARYGAACGRKSRVGGTEGFPTWEALRRRSVVQHKVMFHEYRFQRPLRSLQVKTGKLIGEIDSIQAFQHEQEKGTHGAIETDVLAMRVHYQRLTADCPVPSSASPSAKHKKKKAGPGTYNPPENNFVVGVGPENKDIMSIAVSKCGEDGIDGNLCQKDMHLLKLSRAKYYRDSGVFNARKLIEIWNSGVKEHLEAISNVTLRGVYFRVFPEFMETQAAHYEELRKEYTKPRWARQRMNLYRLKQHALADFLNLLTALKEDKSQRLLLAHGAGNWASKKGSIRALSARADMDVRARWAGVYTSEGRYGQKPAERFGDRKPAAMLERVGESRLQRRHQYQEMCGAGEETPGADAIQLCRAAYQGRSVQVAEDDSSGPVKIGRKAPARWYEFIQHGREKVFVSLSVCESCVALLTGAWLLSCKVARFRSTASYGVGRRLLKGGLFAASGPGSCRGVEAVAPDRTGTSGDHERLLWEALERDVSEAETVGKLPQPLRTELLSKIREFVEEVAQRQSVHDLKSADFALKDEALAPDSQWQLVEPNEPSDAVRSTQPRRASSFGPAADCLTQSPRDRLASQPGGADFNQNGQERLAGINTSGVDSPEKRSVCPPTAVHRRSTVSVHAEEWTWSDDSAYDPVDGANEYRPEQQLNSDTPNPIRGSAKDPSERDIKAQESAHHATEDREILSELSEVEHANDDRTLDTRDAYGRMQQRLRPASRTQMRMDVPGNDTQRAREDARIGPEQPVSQASMRPGKRYRRRTGNGTRVGIATPEPEQPPASRALPERLAKDAHDSATDEEVFRLARMYYAQFRGMLSLALREVSECNAERWNRRERLTSRLRSTLEGAIALLGEAGTERLVTTNDMNDLLSCLAGLRFLDELEEVLELMESRNIPRDNRTYTLVLDALCKAKRIDTAIDIFENYVVRGAAQDGAPCGGRHQRASRVHPTLVMYNILIGGCARTLRLDKAFEFFERLQSPPDNFSPDTHTYCALLDACARCSNTELALHVFEEIERKGEQIDSAVYGALLAAVARSGDRRLAFAVRGLMRRRGLAPTTAVFANLMELCAADGDYLSGFALLREMRAWGRDPTHPIYVNLMNACGRSGQPEYAMAVLDLMKSNGVAPSESAYCALIDAWARIKRLDRAFGVWRDMRAGGFEPRLRTASALLSACRRCKNLQVAHWLYQALRAELARERRTAETSEDGTNSLASQQVQIFRTMMELACDVGDYRHAVLIYLTDAAQSGLLESKHARLALRSSLRRLRQAVFRCSASGDDMETLRNAFRNLVDARAAQI

SEQ ID NO: 4608 - protein, 688 aa, Cyanidioschyzon merolae
MVRAVFALYPDISRNGKWAMINGITSDRKHEDEVEFVDKKAPNENTNEASVIRAVIQEHRAERYYRLILRYFVFLDRELERKAETKLSEGKNEEWERRKAALMGKRFDVVPVCKIKSHFVTIDSGVLYGIMRDISPEFSVSRENFTGENRETYLKNISNFKRLRVNKQKLFTGMIETDGVALCVHYRRLKKDRPVPPSAAPVTKGAEKKEADPETQEVEDNDFVVEVTKDEDEKEADPATQKVQDNDLVVDAAKDEDEKEADPETQEVEDNDFVVCADPGNTNIITIAAPKRAEDGTDGNVRQKDMRVLRISRARYYRESGIMNARKKIATWNAGMKDHLEALSEVTSRRADFQAFRKFMEVCIVHWDALWEEYTKARWARLRMNLYCGKQRGFANLFNNLSALKEDENQRLVVAYGAGRWKTQKGTTPAPTTRTYRECARRFVTIPVDEFRTSYAHHELGCTLQRVEMEKCQRSAEEIAKYGPLTEAQTERSAKVRGLLALVSITPDGKKRMEFVNRDFNAAINLRKCAASAHQSETICLRRVRRHYCTPPTSFDSRKAFSRGDKSAVPVASNGQTHTESGHLRQVRYEVWSVTAKNREEDGNHPARQVHVSVLREGCSEAEGSRRMGVQALSEADSWWRLGPEHHRSGNSAHDDSSSARDRGAVRLFGEGQRALGGVLDESRRGCV

SEQ ID NO: 4609 - protein, 499 aa, Cyanidioschyzon merolae
MQEVEDNDFVVGADPGNTNIITIAAPKRAEDGADGKLRQKDMRLLRFSTAGYYRESGTMNARKKIETWNSGMKDHLEAMSEVTSRGANFGAFREFMAIRVANWDALWEEYTNSRWACFRMNFYCGKERAFANFSNELSALKEDKTRRLVVAYGAGCWKTRNGTTPAPTTRVYKECARRLVTIPVDEFQTSYTHHELGVMSTREFEGLSNSDVWGSSGPKVTPTGVKALYIANIGRAPQRDIEKLVEPYGKVQRIEMKSNYCFVYFSEDTAVEAYEHAIAALNGQRLGSQSRILTAEWARGTAPASISRLQESEKTLGGEDSITGGDGACLENSVTTSKTLFVVNFDPDEITSRDLLIHFHRFGPIERIERRKHFAFIEFRSLDDAIRARSEMDGAYIGCRQVSVEFSQKGPPAPNGDPATESGSCTLVRNTTRTPWRQGLDTRRPRSLDRSTRNPSWARRRRRSYSPPLFPAMSSRRQARMRNSSMEAPLPETSALYRS

SEQ ID NO: 4610 - protein, 242 aa, Cyanidioschyzon merolae
MCAHDRRLKADRHIVPSASPVTKHEDVKQADPATQEVQDTGFGGGADPGMTNIITIAAPKRAGDGADGNLRQIEMRLLRFSRPRYYRESGSMNARKKIETWNAGVKDQLEAMSEVTIRHADFQDLPEFMDTQAAHVEELRKEYRKQRCARQRLNLYRENQRAYANDFNPLSALKEDERTTPAPTTRTLKERTRRFVTIPIEGRDGNVPAEPRGYKKVQTADGGANGKEGKSSRTPCIREYNQ

SEQ ID NO: 4611 - protein, 242 aa, Cyanidioschyzon merolae
MCVHDRRLKADRHIVPSASPVTKHEDEKQADPATQEVQDTGFGGGADPAITKIITIAAPKRAGDGADGNLRQIDMRLLRFSRPRYYRESGTMNARKKIETWNAGVKDQLEAMSKVTIRHADFQDLPEFMDTQAAHVEELRKEYRKQRCARQRLNLYRENQRAYANDFNPLSALKEDERTTPAPTTRTLKECTRRFVTIPIEGRDGNVPAEPRGYKKVQTADGGANGKEGKSSRTPCIREYNQ

SEQ ID NO: 4612 - protein, 260 aa, Cyanidioschyzon merolae
MQKVQDNDFVLGADPGNTNIITIAAPKRAEDGADGNFRQKDMRLLRFSRARYYRESGIVNARKKIVTWNSGMKDHLEAMSEVTSRGADLDAFRKFMEVRVAHWDALWEEYTKPRWARLRMNLYGGMQHEFRTSYTHHELGCTLQRVEMEKCQRSPKDTKKYGALPEGQMERRAKVRGLLASVSTTSDGTKRMEFVNRDFNAAINIRRCAALETRPPALTRVNFVGQPLKVELYEKKLEAVVGGRSKKTGRRLHSNWRRFV

SEQ ID NO: 4613 - protein, 239 aa, Cyanidioschyzon merolae
MFAGRSSPQTKGIHWVDRNRWSSHLCTLSALRKDRPVPPSAAPVTKDEAKKEAGPATQEVEHNDLVVDADPGNTNIITIAAPKRAEDGADGNFRQKDMCLLRFSRARYCRESGIVNARKKIVTWNSGMKDHLEAMSEVTSRGADLDAFRKFMEVRVAHWDALWEEYTKPRWARLRMNLYGGMQRAFANFLNQLSDLKEDKSQRLIVAYGAGRWKTQKGRRQLQRRERRGSAHGVLKQYL

SEQ ID NO: 4614 - protein, 1709 aa, Cyanidioschyzon merolae
MNCVAEELNRSHESTCHWRKHKARPGQTRPGRGTFRLGGIVISLQCSGTLLLFCLYGARQAHLEYLAVTRQDGYLAVEGKPDRDHLRVALTYMLCLRYSRAKVQYFISMVFRPSSNDIPVVFAQKVLERQVVDPRGQVSPDAGKSGEHCRAQKHWRGPRRGKCMRTTWSLVQTPDTRRSVAIAVRECAEDGMDGNLRPKDMRLLSFSRARCYRESGIMNARTKIETWNAGMKDHVEASSDVTSRGADFQTFLKCMEVRVADWEALWKAYPKPRWARLRMRLYCGKQRAFANFFNPLNALKEDEGYTPAPTTRTYKERARRFVTIPIDAFRTSYTHHELGCTLQRVEIEKCQRGPEHLKKYGAPTEEQMERRAKVRELLALVYTTSDGKKRMEFVNRDLNAAINIRRSAVMGKRPPELTGENFVGQRLMVELYRMKMKPVVGGQSSETVRLRRFSWRRFVTSLAERYGADRKAVPLYRRALRVHVAGSFDMSAGPRYSDESGTFLLETSRLARRRRAVVEELWNHRLAWPPAQLHHVYQGTFYTSLNDLDVARSAFRESHVPLREALGTEIQMLLGFDLDSGKWCGRMPAPPPLPDSFVYKVLFESGLPWQESVLALGYIPFQYGLSGDATDRLTRFRETSWRKAPRAAPAGAPEQSRGRSLKNSSLVDTTQPVIVPLRLSAVLLEQAVTFLMTSVSGASLEDPDTIVVRERTSAVLCGDVQVASQDESTPSSIPTLKPHHEFSDRVQQQTHRAEPATDMAVGENRSRRTTPACVRRMNVCTGEAHATAPSRITSPTRPDRYQAAFGHRAKTGRLAASSHASAADAAASASTNTAPAGTGQCEQNDLAQRERHFLIGRHIARLPSMLARCLLIRLIATNQLTLPLLCLFQGLELPILSLRSCRMHITDTWMPLIGTFVGLEELDLSFCHRITDQGIRFLARRYGSEENTEEPSVASRTLRSLSLQGCNQLTNTAVLHLEAFPRLKRLDVSDCPNMGNAALQVLAERFRLRALSVARCERVGSSSIAALLRGENHNRMASSKSVQLDQKAPIEEVPLETNECQLEFLDVSGCPAVGEYAFLGSATRFSNRIAANAASPSTGLPLRTLRLRGCTRVNDTVCEQIGHLFRNLQELDLYGCARVTDRGILDLVRSLEESLQVLCLAETQITDKGLAALAQLRCLRRLHLTRCRRLEFAPGVMEMFCTRMAAQASLSELRLRSLPSVNARVIAELSGLFVAGELKHLNLTDCHQVNDEALLALGEALRVRLMDATPRTSSRTGNSSAVATQRPPRCLVQSLSLRNTGIRDTGLIFKVFIGMRHLDLGECPTLEKLDTLFGDIAEAEEALARFGRRSMRLERPAVPTANRTSAPAFSAYEGIVSGTCSRACRDSHDDVADWRGRTNTNTEDAGCWAPWGLANARASQEAGLSHGPSALPVVPPWLNTLEYLDLSHCQSVSFANLRTLRSESLRILILDHCSGVTNACVALLAYHVPNLQELSLRFTAVGDLGIAAFANRFRHLEKLHLRGLPDVTHVGIRRLAASPLATKLRVLELAECPAIGELALASLNGMKALEYLSLKGCTEINDAALRQLEDVPVLTVLNLRQCPLVSSKQIELLRSRLPSLVEVKFSNESRGLAEHTGTPSALVDSFLAYVHGGSRRSPTGRNQALARQQQVDEAAPSPTRIFLDMFDAWEMGQRSARRRCSRSSSSANR

SEQ ID NO: 4615 - protein, 718 aa, Cyanidioschyzon merolae
MNCVAEELNRSHESTCHWRKHKARPGQTRPGRGTFRLGGIVISLLCSGTLLLFCLYGARQAHLEYLAVTRQDGYLAVEGKPDRDHLRVALTYKLCLRYSRAKVQCFISMVFRPSSNDIPVVFAQKVLERQVDDPRGQVSPDAGKSGEHCRAQKHWRGVRRGKCMRTTWSLVQTPETRRSGTIAVRECAEDGVDGNLRPKDMRLLSFSRARCYRESGIMNARTKIETWNAGMKDHVEASSDVTSRGADFQTFLKCMEVRVADWEALWKAYPKPRWARLRMRLYCGKQRAFANFFNPLNALKEDEGYTPAPTTRTYKERARRFVTIPIDAFRTSYTHHELGCTLQRVEIEKCQRGPEHLKKYGAPTEEQMERRAKVRELLALVYTTSDGKKRMEFVNRDLNAAINIRRSAVMGKRPPELTGENFVGQRLMVELYRMKMKPVSHVLGILRSYLLRPLTTRGRSHWHAVPSRALVAVAERPAGPGGVQKRTERVVPSEAARQERTARLRRAVDLPQNRIYPFLEHKVAGEAKRKDLLAVLEQDSSRFEDERAIRDWVESQIQEAIRQGAFERLPRGPLQLPQPPLGVDLVTYTMHGLLQRHGLRPVWIECMHEVDAEVKRIRLALERAYRARVATAEDTSPASTAQRAERWEAAARELQEQMHQVNRRNDAFNLMKPERLDTVFRLRMRWEHEFMRVKQRVESEYSAEPRSSLAPEATDPKA

SEQ ID NO: 4616 - protein, 495 aa, Cyanidioschyzon merolae
MNGITKDRKHQDEVEFAGEKGSNESTNEASVIRAVLQAHRAILGMANPTDKISELKKDKERYYRLFLRYFVFLDRELERKAEMRLNRENLEWEERKAVLKEKRFNVVPMSNIKSHFVTIDSRIPHGIMKEISPEFDVSREEFSGENREMSWKNIFSSKRLRVSKQKLSTGLIETDGVALCVHYRRLKRDRPVPPSANHEEKEEADPATQEVENNDLVVDAAKDEENEKEDPAMQQVQDNVHVVEVTKDEDEKEADPETRKVQDNDFVIGADPGNTNIITIAAPKRAEDGPDGMNEHLEALSEVMSRGADFKAFRKFMEVRVAHWDALWEEYTKPRWARLRMNLYCGKQRAFANFFNQLSALKEDESQRLVVAYGAGRWKTQKGTAPAPTTRTYKECARRFVTIPIDEFRTSHSHHERGRTLQRVEMEKCQRSPEDAKKYGPLTEEQMERRAKLRGLLALVSTTNDGKKRMEFANRDFNAAINIRRCAVLETRPPE

SEQ ID NO: 4617 - protein, 815 aa, Cyanidioschyzon merolae
MIRAVFALYPGISRKGKWAIINGITNDRKHEDEVEFVDKKASNENTNAASVIRAAIKEHRAVSGLTNPTEKDRELERKAEMKQSEEKNEEWERRKAFLMGKRFNVVPICNIKSHFVTVDSGVLYGIMKEIGPEFNVSREEFSNEARETYWKSIFDFKRLKVSKQKVFTGMIETDGMAMCVHYRRLKKDRPVPPSAAPVTKDEEKEEAGPATRQVEDNDLVVGSVKHEDEKEADPATQKVQDNDIVVGTAPGNTNIITISVPKRAEDGTDGNLCQKDMRLLRFSRARYYRESGIMNAREKIGTWNAGMKDHLEALSEMTSRGADFQAFREFMEVRVARWDALWKEYTKPRWARLRMNLFGGRQRASANFFNQLSALKEDKTQRLVVAYGAGRWKTQKETMPAPTTRTYKECARRFVTIPSVEMEKCQRSAEDIATYGPLTEELMERRAKVRGLLALVSTTSDGKKRMEFVQRDFNATMNIRRVDLYEKKLEPAVGGRSKKTGRRVCTSVGDAFARARSPPLLYTGGDGMQPRRRYRGHATINEERHRAAQFATAASGYVEEREAALREQCVVFQGKLQAFAREHRREIESDGALRTRFLELCMNLGVEPFLSRRSVWSQLLGLSEWYARLGFLVAQIALATRDWNGGVIRLTVLRRALQRRLDVDCGTQEPSEKRARIVSNDDIARAVRTLERLRAGFRIISIDEGKKECCLVSGAAGEISFTEDEKAVLQRARATGGSICRQDLPWENIRWGRSIERLLQLGILWVDDGASDGQRRYWALGLIPESIEDQNPVSESGPSDRYEGRPITSVASKLP

SEQ ID NO: 4618 - protein, 332 aa, Cyanidioschyzon merolae
MVHLRKPRDAPEEYLRLQTSQTRKEKPSMGTIESDGKEVDPATQKVHENDFVFGANPGGTNIITIAVPKRAEDGVDGDLRQRDMRVSRFSRAIYYRESGKMNARKKIETRNAGVKEHLDALSEVTSRGADWQAFREFMEYGTQRAFANFLNELRALKEDENQRLVLAYGAERWTSRKGCMPAPTTTTYKECARRFITIHVDEFRTSYTHHELGCTLQRVEMEKCQRSPEDIKEYGVLTEEQMEMKAKVRGLLALVSTTTNGKKRMEFVNREFNAAINKRCAVIEKRPPELTRRNFVGQPLEVGLYEKKLKPVVGGRSKKTERHLYISSRRFI

SEQ ID NO: 4619 - protein, 299 aa, Cyanidioschyzon merolae
MREISPEFDVSREEFTGENRETHWMNIFDFKRLKASKQKVFTGMIEADGVAMCVHYRRLKADPPGPFPISPVTNRAENDQADSATQEVQENEFVVGADPENATTITNAVPKRAEYGINGNFFQRDMRLLRFSRARYYRESGFTSARKRIEKWNPGTKQHLEAIRDVTSRGADFRAFREFIKTRVAHGNALWKEYTMPRRARPRLNLYCGKQRAFANFFNELSALKGDESQRLVVAYGAGRWGSKKESTPAATPRTYPECARRFVTVPIDEFRASFIHQELRCTLQRVEMQKCQRNPEVI

SEQ ID NO: 4620 - protein, 234 aa, Cyanidioschyzon merolae
MRAEDGNEEHRDVECRNERAPGNYEPGDEPRSGLEIFSEIHGGSRCSLGGAVKRIYKTPVGSSAYESVQWKQRAFANFFNELSALKEDESQRLVVAYGAGRWKTQQGTTPAPTTRMYNGCARRFATIPVDGFRTSSTHHELGCTLQRAEVEKCQRSPEAIKKYGPLTEEQMETRAKLRGLLALVRTSGDKKCMEFVNRDFHAAINIRRCAVIERRPPRVDKREFCGGASQSGII

SEQ ID NO: 4621 - protein, 311 aa, Cyanidioschyzon merolae
MSERHASVEVLESKRLKRIRYNECEEEHRDVECRNERAPGSYEPGDEPRSGLEIFSEIHGGSRCSLGGAVKRIYKTPVGSSAYESIQWKQRAFANFFNELSALKEDESQRLVVAYGAGRWKTQKGTTPAPTTRMYNGCARSFATIPVDGFRTSSTHHELGCTLQRAEVEKCQRSPEAIKKYGPLTEEQMERRAKLRGLLAWVSTTNGAKKRMESVNRASNAAINIRRCSVLDTGPAGLTRSSFAGQSLRLEVNREKLMPIAVGWSKTTVRSTVPCSWCRIPAWIRMTPDARLQPTTRGRGTSIPVAASTLQ

SEQ ID NO: 4622 - protein, 705 aa, Cyanidioschyzon merolae
MRAVIQEHRAVLGFANPAENVSELKKDKERYYRLVLRYFLFLDRELDPKAEMKLSEESNEEWERRKAVLMGKRFNMVPMCNIKSLFMTIDSRILHGIMKEISPEFSVNREEFSGENRETHWKNIFDFKRLKVSKQKKGRPVPPSANHEYEKEADPATQEVQDNDHVVDAAKHDEKKDSDPATQKVQDNDFVVGADPGSTNIITIAVPRSAEARTDGNLLQKDMRLLRFSRARYYRESRILNTTKNIETCNSGMKEHLETLSEVTSRGADFDAFRKIMEVPVAHWKPLWEEYTKPRWARLRMKLYCDEFRTSYTHHELGCTLQRVEMEKCQRNPEDIKKYGPLTEEQMKKMAKVRGLLALVRTTNGKKRIEFVNRDFNAAINVRSAVLEKRPRRSTRVNFIGQPLKVELYEKKLEAVVGAGRERLGGVCTSVADVVFTAGFSPLLYCRPQRLDCAARSICNWSACEPLHASRDTWGLVRGRRTASVRSEARTARRVSRGTRLPSARSTFQQLQMVRTESAMVELGTVMPAFALPDVTTGEIVSLDSLYADSPPPKALVVVFLAAHCPFVKHIAGELSRLSADISSGKFGPVKMVGISSNFVGTHPDDAPERMAEEIKTRRYQFPILYDETQDVARGWKAACTPDFYLLDHERKLFYRGRLDGSRPGNDIPVTGEDLRNAIQLCVNGQSPPENQLPSIGCSIKWKPS

SEQ ID NO: 4623 - protein, 450 aa, Cyanidioschyzon merolae
MYLDVTDMETVEVPGDFFDKTILRHLMLSKGEARRENELVHAFHENHSEYHFNGTRYMGYWGMFTYGAMKYLTNLKKHMIVNLERFMIGAVFALYPGASRKGIWAIINGITKDHKREDEIQFVDKKASNESTNEASVIRAVMQEHRTERYYLLILRYFVFLDRELEGKAEMKLSGTKNEDSEKRKAFLMGDALQRRSCIMKEISSEFDVSREESSGENRETYWKNIFDFKRLNTSKQKLFTGMIETDGVTMYVHYRRLKTDRPVPPSAAPVTNHEDEKEEDPVTQEVEDNGFVVGTDPGNTNHIAIAAPKRAEDGTDGNLPHKDIRLFKLSRARYYRESGIMSARKKIQTWNARVKDHLEATSEMTCRGAGYRAFREFMKVRVAHWEALWREYTKPRWAFQRMNLYCGKQRTFNILFSQLSALKECKRQRPVVAYGASRWASKTGAHAEA

SEQ ID NO: 4624 - protein, 624 aa, Cyanidioschyzon merolae
MYLDVTHMESVEIPDEVFDKTIFLYLMLCTAGTWRENVLVHALHENFAAFRFERTRYRGGADIYDHGAMKYLTNLTSRLTTNLERFVIRAAVALRPGISRKGKWATINGITKDRQHEDEVEFVEKKASNESANEASVIRATVQEHRAERYYRLVLRYFVFLDRELERKAEMKLSEETNEEWERRKAVLVGKRSGVVPLSNIKSYFVSIDSGVLYGIMREIGPKFSVSRKDFTGENRETHWKRISDSKRPKVSKQNVFTGKIETDGVAFCVHDRRLKTDRPVPPLTSPVTRDEENKEEERAIQEVEDNDLVVDVTKDEDKKTADPAMQEVEHNDLVVGAVKNEENKKAGSEKQKVQDIDFVVGTDPGSTNTITIAAPKRAEDGTYGNLRQKDIRLLTFSRARFYRESGVINATKKIETWNSGMKEHLEAMSEVTSRGADFRAFRKFMEVRVAHWDALWKEYTKPRWARLRMNLHCGRQRAFANFFNQLRALNGDQSQRLVVAYGAGRWKTQKGCIPAPTTRTYKECGRRLVTIPVDEFRTSYTHHELGCTLQTVEIDKCQRCPEEIAKYGPLTEEQMERRANVRGLPALVSTTNDGKNRMECVNRDFHAPSNIRRCAVLENRSPE

SEQ ID NO: 4625 - protein, 299 aa, Cyanidioschyzon merolae
MQEVEHNDLVVGAVKNEENKKAGSEKQKVQDIDFVVGTDPGSTNTITIAAPKRAEDGTYGNLRQKDIRLLTFSRARFYRESGVINATKKIETWNSGMKEHLEAMSEVTSRGADFRAFRKFMEVRVAHWDALWKEYTKPRWARLRMNLHCGRQRAFANFFNQLRALNGDQTQRLVVAYGAGRWKTQKGCIPAPTTRTYKECGRRLVTISVDEFRTSYTHHELGCTLQTVEMEKCQRCPEEIAKYGPLTEEQMERRANVRGLPALVSTTNDGKNRMEFVNRDFHAPSNIRRCAVLENRSPE

SEQ ID NO: 4626 - protein, 238 aa, Cyanidioschyzon merolae
MGENRETYWKNIFDFNRLKMRKKKVFTGIIESDEVSTCVYYRRLKADRLVPSSASPVTKDAENKEADPATQEVQENDTVVSADPGKTKIVSIAVPKRTEDGIDGNLRQKDMRLLRFARARYYRESGIMNARKNIEAWNAGMNEHLEAISQVTSRGANLEAFREFMKTQAAHWDALWKEYIKPRWARRRMNLYCGKQRAFTDIFHELSALKEVESHRLVVGNGAGRWASIKGCIPAPTT

SEQ ID NO: 4627 - protein, 347 aa, Cyanidioschyzon merolae
MGKRFNVVPLGNIKSHFVTIDSGVLYGIMTEISPAFDLRREEFSGETRQTRLKTDRPVPSSTKHEDGKKADPATQEVQDNDFVVRADPGNTNIISIAVSKLAEDGIDGNLRQKDMRPLRFSRARYYRESGMRNARKKIETWNSGMKEHLEALSEVTSRGADFGAFRTFMEVRIAHWDALWEEYSKPRWARLRMNLYCGKQRAFANFFNQLSALKEDESQRLVVAYGAGRWAPKKGTTPAPTTRVYKECARRFVTIPVDEFRSSYAHHELGCTLQRVEMDKCQRSPEDIIKYGPLTEEQMERMAKVRGLLALVSTNNDGKKRMEFVNRDFNAAINIRRCAVLETRPPD

SEQ ID NO: 4628 - protein, 458 aa, Cyanidioschyzon merolae
MQEHRAVSGLANPTDKISELKKDKERYDRLVLRYFVFLDRELDRKAEMKLSEEKNEEWERRKAFLMGERFNVVPLGNIKSHFVTIDSGVLYGIMTETSPEFDVRSTEITAETRETYWKNIFNFKGLKVSKKKEFTGLIESDGIPMCVHYLRLRKDRPVPPSASRSAKHEENKQADAATQKVQENDFVVGADPGNTNIISIAVSKLADDGTDGNLRQKHMRLLRFSTARDYRESGIMNARKKIKTWNAGIKDHLEAMSEVTSRGADFQAFLKFMKVRVAHWEALWEEYTKPRWARLRMNLYCGKQRAFANFFNQLNALKEDESQRLVVAYGAGRWKTQKGCTPAPTTRAHKECARRFVTIPVDEFRTSYTHHELGCTLQRVEMEKCQRSPEDIIKYGPLTEEQMERMAKVRGLLALVSTTNDGKKRMEFVNRDFDAAINIRRCAVLETRAPELTRENFV

SEQ ID NO: 4629 - protein, 602 aa, Cyanidioschyzon merolae
MSIKKASSELMHMVKEIYRDMTDIITVEVPEEFWNRNFIRHLMPGTWETSKRDELVRAFHEGRAEFRFKGTRYRGDRDIYDYGAMKYLTNLKNHLTTNLERFIIRAVFALCPGISRKGIWAIINDITNDRKHEDGVEFVDKKESNESTNEASVIRAVVQEHRAVVGLANPPEKISELKKDKERYDRLVLRYFLFLDRELERKAEMKLSEESNEEWERQKAFLVGIMKEICPEFDVSREEFTGETRPTYWKSIFDFKRLKVSRQKLFTGIIETDGVAMSVNYRLLKKDRPVPPSASPVTKDEEKEEAGPATQDVQDNDLVVGAAKDEDEEEAGPATHKVQDNDFAVGADPGNTNIITMAVPKRVEDGADGNLRQKDMRLLRFSRARHYRESGIMNARKKIETWNAGIKDHLEAMSEVTSRGAGFQAFRKFMKVRVAHWDALWEEYTKPRWARLRMNLYCGKQRAFANFFNQLSALKEDESQRLVVAYGAGRWKTQKGCTPAPTTRTYKECARRFVTIPVDEFRTSYTHHELGCTLQRVEMEKCQRSPEEIAKYAPLTEKQMERMAKGRRLLALVSTTNDSKKRMEFVNRNFNAAINIRRCVAL

SEQ ID NO: 4630 - protein, 858 aa, Cyanidioschyzon merolae
MRLLRFSRARYGRESGIMNARNKIETWNTGMKDLLEAMSKVTSRGADFHAFREFMQVRVAHWDALWEEYTKPRWARLRMNLYSGKQREFAIFFNHLSALKEDKTQRLVVAYGAGRWAPKKGTTPAPTTRMYKSCARRFLTIPVDEFRMSYTHLELVCTLQRVEMEKCQPSPEEIAKYGPLTEEQMERRAKFRGLLALVSTTPNGTNRMEFVNRDFNAALNIRKCAVLETRPPEWTRGNFFGQPLQVQLYEKKLEAAVGGRARLPPLLYTAGVVRLSNGVRMRRTLRQFSLTMTQVVKRSDAETESSLGAYERERLARMERNRMLMEKLGVTSLSNRLETITTVREQALKPIGYSKRTPKAEKRARNSENEVDRGELEPRRRSLRVRGIAPAGAGTSAEEPKNSQLQLKEEETSRGPFLEDQTFAEVALENYGATSESSMVNDDYDRSDVDDVDGNKDDGDQKSLCTRRARLFQRAWCGAMACTSLSTSEHLAKDPSRFHRWVLDEASGFFKLVPARIYSATMHPRLDAWTMMVGDKAGHVGLAVVPRERVAEHAVQVLCMRVHRDTTAGMAPRAGSANSQQLLTVSYDGSARLLDIEKQTIQTVLVDERERIFKSIALSTENDNVFWTTASHRSLGGFLVRHDLRQSQKSFDAFGISDSRVYSVSLQHQGAAGAVPGHDGLLAVTTARDGVLIFDQRRIETGATRRSTSKPLFALPHERATTAATWSPSATRLLTTCYDDLLRIWHYDGSECSLEHRFVHNNHTGRWVTPFEACWDPATDHKIFACGSMNHNPVHGVDLFHVELNKRSVWNRLTGEPMTAIAAVLAWHPAGHALIGGTASGRVYLWGEAHGSEGVLAA

SEQ ID NO: 4631 - protein, 722 aa, Cyanidioschyzon merolae
MIRAVFALRPDLSRKGIWTIIDGVTNVSKNEQETEFVNKKTSRRRKNEASVIRAVMHEHRAALGLANRAEEVLDMKKDEERRYRLILHYVMFLNREVERKAEIKLSVEKNEKWAKRKAAVLEKHFNEVPLCHIKSNFVTIDSRVLYGIMKEICPEFNQAKGIHWDNRNQWRIHMRTLSALEENKEADPATQEVHENNDFVGGADPANTNIINITVPKRAEDGTDGHLRRKGKRLLRFSRARYYRESGIMNARKKIETWNAGMKDHLESLCEVTSRRADFNAFRTFMEVRIAHWDALWEEYSKPRWARLRMSLYCGKQRAFANFFNQLSALKEDESQRLLVAYGAGRWKTQKGTTPAPTARTYKEWPVQKSLGGVCTSAGDVLSRAGFSPRLYAAGGSVFLLKGVRCRCCTFPRQASRLLRHYAGNAAYTCIGLKARGMLESELDQALVFAEALARECGELIRQAFFKDWPFRTAPVGGYHTAYDVKKRTDPVTETDRAVEELCRRRILERYGTGHRVLGEEGFDGRPESLQVKDLDPPTWAIDPIDGTANFVHHIPLCAVSIALITEGQARLGVVYNPIMEEMFVARRSRGAFLNGKPIFCSGVSELPDACIATEYGSDRSASKVAMMLEMVRSILENGTQAVRSTGSAALNMAFVACGRFDVVTEWGPYTWDLAAGQVLVEEAGGVCLLPNGAQFILDGRGILAANRYLAEKLRFQAYAFA

SEQ ID NO: 4632 - protein, 1525 aa, Cyanidioschyzon merolae
MKHEEKKEASLETQKVQDNDLVVGADPRNTNIITIAAPKRAEDGADGNFRQKDMRLLRFSRARYCRESGMMNARKKTEKWNAGMKDHLEALSEVTSRRADFEAFRKFMEVRVAHWDALWEEYTKPRRARLRMNLYGGRQRAFADFFNELSALKEDENQRLVVAYGAGRRKIQKGTTPAPTTRTSKECARCFVTIPVDEFRALHTHHELGCTLQSVEMEKCQRTPEDIKKYGALTEEQTERRAKVRGLGALVSTTTNGEKRMEFVNRDFNAAINTRKCAVLETRPPESTRENFLGQPLKVELYETTLEAVVDGRSKRTRRRLHLGWRRFVQGGFLATTVHGRHRPCDRRPQGTDTSRSAVTWRHSACSAQTDVYVCPRAGRFAWMASSSPAPGRTLFIRQVPVEFPFEPYPCQVRYMEHVIEALQTGQNALLESPTGTGKTLGLLCAALAWRSLLVAQVQGQASTQRISKSLADDSPKNDYGERLLQGVQGAAGAVVAPEASLRGLVPAASSENGPGPTPLQSVPRIIYLTRTHSQIKQAVRELSRTAYGASVRTVVLGSRQHLCVHPVVSRLENATMQNVRCTQLTKERRCSFYLNAEQKFKEVGDDFFFIAVDSTSTLALPGRRPRDLEDLAAYGHQHAMCPYFLSREASAEAEIIFMPYNYLFDGKCRRSLGLSVEGDIIIGDEAHNLESICCDSLSFDFTAAERQRCVSAIQQLASALSSGLLNRDGREGSNTEPALHASDLHALLEIMVALEERISLVSQADAKASHARPGAENGGTVCFGQRRRIEGIDGVVLPGHAIESFLQCSSKDATLTEEAYERLLRGVEAAIRALTQLRQQFPDGTAAALDHSQAPEADAIETRDQGDPYTGLLHRQVRTTQRTSAAAWAAQVHALEQLSQVLELSRLFGKPETASTFAICVHEPAKGTAGTTHQAMNPSRLKTPSAYDGVGWPRQTPSQQRPPLSGTAAAEAASGKYVHQSAREHRSSTGYTLSFWCLWPGLALRRATSNAHAVLLTSGTLSPLESVASEMGASFPVRLQNSHVVDPATQVFAGILTKGPRDIQLNSSYANRHNREYISDLGSALVNIARVSPRGMLVFFPSYVLLARFVEIWQTGAFHHNNPLNPAHRGRQPTQATVWDRLNAVKRIFMEPRDADASRQTVDAYRQWISSGRDACLFAVCRGRTGEGIDFADDFGRTVILVGLPFPSTTDPRIILKRDYLERQALHLRDHGKTITGRLWYVQQCLRAANQAMGRVIRHAQDFGAILLCDERFRAHLRDLPRWLSAASSDADPRATHNIQVFERFGTFMSNLCGFWHSERIRQLSAAQLELATSVPPVRTPVDPFQASKDEQPRLQSMAQHAAMIGRQSQEYDQAGKTGTCDARRARSLSLSSQSSKRLRETNVAATAVSSTSTAEPGLVWKAKAERRAVSAVHKDAALARGSQMISKTIMERIRARVGDRTFSLIFQQMKRYYRLALIARQPQHSVELQQIQTELQRLVNDPSDFEQLRLLLGEGAPAMRSST

SEQ ID NO: 4633 - protein, 313 aa, Cyanidioschyzon merolae
MCVHYRRLKRDRPGPPSAAPVLKDEDEKKADPATQKVHENNAFSRAEDGTGGNLRHKEMRLLRFSRAIYSRESGIMNARKKIETWNAGMKDHLEALSEVTSRGADFEAFRKFIGVRVAHWEAPWEGYTKPRWARLRMNRYGGKQRAFANFFNELSALKEDESQRLVVAYGAGRWKTRKRCTPAPTTRTYKDCTRRIVTIPVDEFRTSYTHHELGCTLQSVEMEKCQRSPEDIKKYGPLTEEQMERRAKVPGLLALVSTTSDGKKRMEFVNRDFDAAINTRKCAVLETRPPESTRMNFIGQPPKLELYEKNWKK

SEQ ID NO: 4634 - protein, 713 aa, Cyanidioschyzon merolae
MCVRYRRSKADRPGPPSISPSGKHEEKEMADPRMQEVQESDFVVGADPGATNIVTIAVPKRAENGIRGNLHQKDMRILRFSRARYYRESGIMNTRKKIETWNAGMNEHQEAMSQVTSRGADCRAFREFMEVRVAHWDALWEEYTKPRWARLRMNLYGGKQRAFTNSFNQLSALKEDESQGLVVAYGAGRWKTQKGTTPAPTTRTCKECARRFVTIPIDEFRTSYTHHELGCTLQRVEMEKRQRSPEEIAKYGPLTEEQMERRAKVRGLLALLVARRERRGGVRTPVGDAISNTRSPPLLYTAGDCLRPLKSFRSTRNTPKRRYRTSLSNSIKDLQPPSARMLRVHVERHRKQKTQSVQTAQRWKLRANLNRRGPDSATWDRQGGGQAERLLMEQVLQLRRELDALRAENESLRKYRVNEHLLVDADDSVTTEDGRTRCGKHGERSRYLPVYSVAPEEVLSRVIPVIGPNPTIEQLDAAITLSFQVRDELVNRRGLERYEDVMAGRFLVFQTSELPVKGVQRVALPGTVGSMRWASAPVGILMPASELGLESFYPNAPTDVNCLVIIEADFDSEIPADTLASPDIIRDIRDGTKDVLDRIENVWFDEQGRASRDAGFPSSLTEETETDEDEQPDENGDGPEFSPGKFYLWLEERPPQGVESGEEPAHRWHVRWYERRPDPAVDGVECVGRVITVIAPSASRRRTKTFAEEDDVF

SEQ ID NO: 4635 - protein, 675 aa, Cyanidioschyzon merolae
MYRDVTPIETVEIPHVFFDKIFIRQLTLGTEEAREENERVDVFHEKHPFYSLNGTRYKGDRDIYTYRPMKYITNLKNHLTVNLERFMRRAVIALYSGISRNGKWAIINGIMKDRKREDEVEFVDKTTSKVSTNEASTIRAVIQEDRAGLGLVNPTDKILALKKEKERYYRLVLRYFVFLDRDIERKAEVMLSEETNEEWERRKAFLMGKRFNVVPLGNIKSHFVTIDSRILHGVMREISPEFDFSREDFTGENRETYWMSIFDFKRLKVSKKKVFIGLIETDGVALCIRYWRLKKDRPVPPLAALVTKHEENKEADPVMQEVQDNDLIVDAAKHEENKGAGPATQEVEDNDFIVDVTKHGDEKDADPATQKVQDNDLVVDATKHEENNKAGSEKQKVQDNDFIVGADPGNTNIIAVAAPKRAEDGTDGNLRQKDMRLLRFSRARYYRESAIMNARKEIETWNSGMKDHLEALSEVTSRGADFEAFRKSMGVRVAHWDALWEEYTKPRWARLCMHLYGGRQRAFANFFNQLSALKENENQRLVVAYGAGRWKTLKGTTPAPTTRAYKECARRLFTIPVDEFRTSYTHHELGCTLRRVGMEKCQRNPEEIAKYGPLTEEQMERRAKVRGLLALVSTTSDSKKRMEFVNRDFNAAINIRKCAVLEKRPPESTRENFIG

SEQ ID NO: 4636 - protein, 1076 aa, Cyanidioschyzon merolae
MEVRMAHWDALWEEYTKPRWARLRMNLYGGKQRAFANFFNQLSALKEDESQRLVVAYGAGRWAPKKGTTPAPTTRVHKQCARRFVTIPVDEFRTSYIYHELGCTLQSVEIEKCQRSPEEIAKYGPLTEEQMERRAKVRGLLAIVSTTRNGKKRMEFVNRDFNAAINVRRCAVLETRPPELTRENFIGQPIKVELDEKKLEAVTVFPPLLYTVGVVRLSNGVVGATESMELRLVQFRSLKPYTCNAEHPFRLRGRVLRTLVENRSGRAILALLEPWPSVPAPQQTVVVLVCTGDWTAAGTALAHWDVVEVQNAQVVPLGDICEARDHGLLDSCLELHEYAVVLGPDQREACCAGAADATACKPALTIFKDAGKCNDLSQLANARIMKLSPESIGQTLVVTEHGAGTDTSGRPVAQHESCEPVPRPVVPLDSKHHYLTLEQLRHPGQMSGRTYDVYGVIVDVRAPRLVRTGELLTELQIIDPSIVVTDSDGRLVSFAPPQFMLTSFSSRLSDCVPYIGVGDVVRVHRAELRWFPQQSPSGSKTETLELKTNSLSSMCLWPALAQHDEGAGLGRSSASASGDLSGLRAATATHLEEMNHLPDPLIYAYPSNTKSIVITNSEKCYAMELLRWARALLSQSGFLGSKAFSATLRDILQSSLVVDSANGSAMQRLRYDLVVLIRDLEKTPYEFLLKVTDGSISDLVTVSIAAECWTRLTHRLEPHLRGNWFRLRDVRLDRRPGLPLRLTMNEGSSIYKFPQWMPEVQSRMQHLGAALTDPTCRTDSQSAYEAAPVAHQRALGTRNTPEQMSAAAYPILSAPCTELNRERVAYTTTSHTTTNIESAETGIVKRGPVQHPSCLHCSGPPLLQTSSTMSIPWQALRPQSLAHMLDDMRALRSMRAAGNACARADTPMHRLYRVYACVCDVHWIVDADSRHMLQLLLTDLPFQCPSGSKEAVENQPFLNDDLRFENRKIIASAPTVISAWVLDEDLTTLCTGTNMSWSTAEPERVEAFSQSLRYVLTMPFVWIDVLLVASWGDDLRAERPASDIIKEQSGLQPWVVLIEPVLRVPLWDETDNQASV

SEQ ID NO: 4637 - protein, 459 aa, Cyanidioschyzon merolae
MYRNVTHMETVEIPDEFFDKTSTRQLMFGTGETRRENERVHALHEKRPFYSLEGTRYKGDSRICTYGAMKYITNLKNHSTMNLERFMIRAVFALYPVFSRKAIWAIINGIKNNGQHEDEIEFVDKKVSNENTSEASVIRALFQEDRLVLGLANPAEKISELKKYKERYFRLILPYFVFLDRELKRKAEMMRDEEENEEWERRKAALMGKRFNVVPLCNVKSHFVTINSSVLHGPLKEISPEFDIREEFSKVTNRGAVFRAFREFMETQAAHDEEMWKEYSKPRWARLRMNLYSGKQRAFAKFFNELSALEDDKSHRLVVAYGAGRWVTQKGCTPAPTTRTYKEWARRFVTIPKDKFRTFYKHHELGYTLQRVEMEKCQRIPEDMKTYGALTVERMERGAKVRGILALVSTTNDGKKRMEFVNRDFNAAVNIRRCAVLETRPPELNTREFCGRTSQSGLI

SEQ ID NO: 4638 - protein, 237 aa, Cyanidioschyzon merolae
MQEVQDNDFVVGADPGNTSIITISVPKCAEDGTDGNLRQKDMRLLRLSRARYYRESGIMNARKKIETWNSGMKEHLEALSEVTRRGADFAAFRKFMKVRVAHWDALWEEYTKPRRARLRMNLYCGEQRAFANFFNQLSDLKEDGNQRLVVAYGARRWKTQKGTTPAPTTRTYKEGARRFVTIPVDEFRTSYTHHEQGCTLQTVEMEKCQRSPEDIKKYGPLTEEQMERRARLRGLLA

SEQ ID NO: 4639 - protein, 291 aa, Cyanidioschyzon merolae
MLDATKHEEKNEAGPAAQKVQDNDFVIGMDPGNTNIITIAAPKCAEDCIDGNLRLKDMHLLRFSRARYYRESGIMNARKKIAAWNAGMKDHLESSSEVTSRGADFEAFRKFMEVRVAHWDALWEGYIKPRWARLRMNLFGGTQRAFANFFNKLSALKEDKTQRLVIAYGAGRWKTQKGTTPAPTTRTYKECARRFVTIPVDEFRTSCTHHELGCTLQRVDMENFQRSPEDMKKYGPLTEEQMESRAKVRGLGALVSTTTNGKKRMEFVNRDFNAAINIRRCAVLEKTPPKS

SEQ ID NO: 4640 - protein, 237 aa, Cyanidioschyzon merolae
MQKVQENDFVVGVDPGNTNIITIAAPKRAEDGTDGNLRQKDMRLSRFSRARYYRESGVMNARKKTEKWNSGMKDLPEHLSGVTSRGADFEAFRKFVEVRMAHWDVLWEEYTMPRWARLRVKLYCGKQRAFANFFNQLSALKENENQKLVVAYGAGHWKTQKGTTPAPTTRTYKECAQRFVAIPVDEFRTSYTHHELGCTLQRVEMKKCRRIPEEIAKYGPLTEEQMERSAKVRGLLA

SEQ ID NO: 4641 - protein, 772 aa, Cyanidioschyzon merolae
MKEFSPEFNVSRKESTGENRDTYWKNIFDFTSLKVSKQKVFTGVIETDGVAMCVHYRRLKADRPVPSSIVSVTKHEDEKEADCATQKVQDNDFVVGADPGVTNIVTIAAPKRAEDGTDGNSRQKDMRLLRFSRARYYRGSGVMNARKKIITWNSGMKEHLEALSEVTTRGADSNAFREFMEVRVAHWDALWEEYTKPRWARLLMNLYCGKRLAVANFFSQLSALKEDESQRLVVAYGAGRWRTQKRNYASSNNKNVQETVEMEKYQRSPEDVKKYGPLTEEQMKRRAKVRGLLALVSPTTNGKKHMEFVNRDFNAAINIRKCALLEKRPPQLSRENFLGQPLKVELYEKKLEAVLGGRSRNTGSRRAQRRFRCSFPVTVYAKQAPVEPDNPLQFVINTCVYRGSLFSSASALRCLRGQHSHEAQRRCGVAKLSLRSEPHNEQRPLAVSEQRCVFRCGTYQIIGDRPSAEQGTTFPGEALLLSGSTDTVFVCEGKGAVGLADCGHVLYATERGVVRAAFAPIKDTRDVELAHMYTAQYHVRNILDGFIEQVLFSESEQDTARGRNWQPRFELLSCLRDAVTHMRPPEAVRSVSVLAACLANNGNLLYAVRTGNIGFLVIRDQTIVFSSLNGIEGNPETQRTSITIETCTGDVVPIYLDVFRLRAYDTVIFGTDGLFDNISESQILALVCPVSSAYDSNLAVANRTCLGTFTHIDPVLLSYQLAQLAHNFSSCTNCDPYISERMPRLVCPGKGDDASVIVAQLEPESEPEPESP

SEQ ID NO: 4642 - protein, 1095 aa, Cyanidioschyzon merolae
MYRDVTHVEMVEIPDEFFDKTFVRQLMLGTEETWRENERVHVLHENFAKFCFEVPHESEEPFEHEPRTFHDTRVAALYPGLSRNGKWAIIDGITKDRKREDEIEFVDKKASNESTNEASVIRAAIQERRADLGLANLAEKISELKNGKERYHGLILRYFVFLDRELERKAEMKLSGEKNEEWERRKAFLTGKRFNGVPLCNIKSHFVSIDFGVHNGIMRDINPEFDASREDFTGENRETYWKDILDFKRLKMSKQKVFKRMMESDRVAMCVHYGRFKTDRPVLPSAEPVTKHGEKEKEDPATQQVEDNDFVVGADPGNTNIITIAAPKRAEDVIDGSLRQKDMRTLGFSRARYYRESGIMNARKKIETWNEGMKDRLEAMSEVTSRNADFQAFLKLMEVRVAHWDALWEEYTKPRWIRLSALKEDEGQRLFVAYGAGCWKTQKGTTPAPTTRIYKECARRFVTIPIDEFRTSYIHPELGCTLQRVEMEKCQRCPEDIKKYGPLTGEQMERRAKVRGLLALVNTASDGKKRMEFVNRDFNAAINLRKCAVLEKRPPELTRENVVRQPLKVELYAKKLEAVVGGRSKKAGRRLNVPLNEHLTCVVVYLANAQPGSLVAEQQRTPWPVRNCDGRFRALVWLQPGVNLVAAGPLSGPAKLQFRVHYLDVPWDYVVRAVYVVPRDAVEVRFQAPPDEDCMLASAVRRFALALRLMQTAAAELLHEQGLGHLSFCIERMSAACATPLPGNIEEIHCAYDVPVHVRRLSRTRAELHALSGDALWGMIAEELSNISNRQQCIDVAVMSFTSKDASTGRVYGHTALGGGTLALFGSSGMYAWPQTLSEVPKRFSDRRRVDSINFFDDSAGRGERWALASTTIGAMLHELGHCLSLPHPCRGGGIMARGFDYFYRLFTVQDPDPEREAHEPHWDRSAACRLHFHRHFVGALAVVEQIEPDWASFTAQPAASPLPSPERLEHDARVPYQVANAPHASVTRMLPVTNGASASERPSHPLHAVGRSPRITLDANGFVHIFAPNGIGHIGYYVDGDVADHDEFLDSARPVEYFQIALDDIRRRCRIQKPTSTLRISCIDHLGEINEQAV

SEQ ID NO: 4643 - protein, 503 aa, Cyanidioschyzon merolae
MNPERFMIRSIFALYPGLVRKGIWIIVDGIFNDSKNEEKIEFVDEKASSRRRNEASVICAAVQEHREVLGLANPTEEISELKNDEERYHPLILCYFVFLDGELERESETELGVRKNELSERRKAPLLGNHVSVVPLYSINSHVVSISSRVLHGIIREICSEFSVSREEFTGENRETYWKNIFDSRRQKVSKQKVFTGMIETDGVAICVHHRHLKVDRSIMSSASPVTTNEDEKGAGPATQKVHKNDFVVGAAKHEDEKEAAPATQKVHKNEFVVGVDPGTTNIITIAESKRAEDGIYGNLRQKDMRLLRKKIAAWNAGMKEHLEAMSKVTSRGADFDAFREFMEVRIAHWDALWEEYTKPRWARLRMNLYCGRQRAFANFFNALSALKEDESQRLVVAYGAGRWKTQKGTRPAPTTRTYKECARRFATIPIDEFRTWYTHHELGRTIQRVKMETCQRSPEDIAKYGPLTEEQMERRAKVRGLLTSVSTTNDGKKRMEFGNREF

SEQ ID NO: 4644 - protein, 1294 aa, Cyanidioschyzon merolae
MVPPHPALLRVSGPRTRTQGGDGAGADPGNTNIITIAVPKRAEDGINGNLRQTALRVLRFSRAGCYRESGMINVRKKIETRNAGMKDLLEALRGVTSRGAGFEAFPIFMEGRVAHWDALLEEYTKPRWARLRMNLYGGGREPEAGSGIRSRASTKGCTPAPSTRTYKACARRFVMIPIDELRTSYTHHELGYTLETVDMEKCQRSPEDMKKYGALTEEQMDRRAKVRGLLALVSTINGKKRMEIVNRDFNAATNIRRETSRGGIIREKVETGSRWPVQKECEASARRLEAHCRKRAALPLSARSRSFCVESWTVATLSVSFKVMHRVRSRASFSNRSSEDLVQVPPGLELDEEELALLEQQRQLENALARHEHGNVPRSLSRRILDYMVQSSDGADLRTNQSILGTESRAFPEWSTFQRPVARKGPRYDELRLGELLVRRGHPLPYGVSLSPEGTNFAIFTDEEEHVALILYPAKSRRQLRHERLQSAAAASIESATPVTSNTEKSAPKTDSHSGEHVMDKQTETAPPSDASQETGARESSESTPARTESAASALLRRNRAPFIVRESSTDDEDRFEDVRSNAGSTGGSTPRAMSEGLEDPSNNDAVMTTSALQSSTRQAKSVLATAQILPHQSGLLFPMDWFLPVPSIDDAKPLIIELDPVIHRTGHVWHVQIAPNVEHYAYAWRIGDRPTRWGSNIVLDPYAKCVFSPPSADFNRPPGPYRPICGVPAIGELDFDWDGVLPPRYPFKDLIIYELHVRGLTKQTTSPYAGTYLGVIEKIPYLKQLGINAVELMPCAEFNETEWDMRNPSTGERLCQFWGYSPISFFAPMNRYAMQGFTSAVREFKTMVRELHRHGIEVILDVVFNHTGEFGDDGPPPLFYHFKGLALSTYYILDRKNQFANYSGCGNSLSANHVVTAEFIHECVRYWALEMGVDGFRFDLAAVMCRDPQGQPMASPPVIERLSKDPCLRHLKLIAEPWDLGQYLVGHFPHYGCWAEWNGRFRDTVRRFIKGDPHLIGDFATRLCGSEDLYANGRRPWHSINFVTAHDGFTLYDLVSYAEKHNWDNGEENQDGESHNNSWNCGFEGDGTPNPNIFFLRQKQMRNFLVALLISTGTPMVLMGDEYGHTRRGNNNAWCQDNELNYMDWDKVARDERGLVRFTRLMILFRRVNTFLCRQNFVTRHDVSWIHADWSSAYNFLVMRIIDPGNDDLLVGFNAGPERRTVTVPPLSSDRQWLRIVDTNLAPPLDFCNGDNPTKIYGTYVMQPWSSIILQSHRRSVLIQSLEEHLRGREAAS

SEQ ID NO: 4645 - protein, 853 aa, Cyanidioschyzon merolae
MLGTAETRKQDELVHALHENHTESRFGGARYRGDSSVYTYGAMKTYVTNLRNHMTMKLQRFIIRAVFALYPGISRKGIWAIIDGITNDRKHEDEVEFVDEKKSHRSTNEASVIRAPIQEHRAVLGLANQAAKVSELKKDKERHYRLILRYFVFLDRELERKAEMKPSEDKSEEWERQKAFLAVKRFNVVPLCNIKSHYVTIDSGVLHGIMKGICPEFDGRRTEFTGEAPDTQKVFTGMIETDGVALCVDCKRLEAFLPIVPSASPMTKHEENRDADPAALKVHEIDFVVGADPGNTNIITIAVPKRAEDGKDGNLLQKDMRLLRFSRARFYRESGIMNATKKIETWNAGMKDHVEALSEVTSRGADFTAFLKFMNVRVAHWDALRNEYTKPRWARLCMNLYCGRQRAFANFFNGLSALKEDQCQRLVVAYGAARSKTQKGCTPAPTTRTYKEYARRFVIVPVDEFRTSYTHHVLCCTLQRIEMEKCQRSPDEIAKYGPLTEEHMERWANVRGLLALLSTVNGKKRMEFVNRDFNAAINIRTCAVMERRPSEWTRELFLGQPLKAELYEKKWNQYREASHPLHSRNEDESAQRWLQTGVASVQSIHWDRAVPQLLKHGERVRVLYARYGGVKTFPSSLLEHLRSLERLDLSENELVTVPAALLYALPRLWSLNLARNAIGDLHTTEHRANLSVQAQHEPDPVSGVKPTSPLQWLSLSDNRLPCVPDACRNIVFPCLRYLNLAGNHISSLPKWLSKSFPALEVLILSRNELQTLNIESLRGLQNLRQLCLDHNRLESLPVDLFIELGALQRLELEGNRGHLAEAPTAALSEMVGFTDFDQRRRQVQNKRLSATAS

SEQ ID NO: 4646 - protein, 351 aa, Cyanidioschyzon merolae
MEVRMAHWDTLWKEYTKPRWARLRMNLYCGKQRAVANFFNQLSALMEDDSQRLVVAYRAGRWKTQKGTTLAPTTRVYKECARRFVMIRVEEFRTSYTHHELGCTLQRVKMEKCQRSPEEIAKYGALTEEQMERRAKVLGQLAVVSTSSDGKKRMDFVNRDFNSAINMRKMRGDGRSLAAETMSANSSRAALLLTRQLRDLNKSSVDGFSAGLVSEDDPFRWAVTVLGPPDTPFEGGLFRAELTFPPEYPMLPPRMRFLPPIPWHPNVYRNGEVCISILHPPGDDPHGYEMAGERWSPVHTVESILLSVISMLASPNDESPANIDAAKEWREQPDAYRRRVRSLVRQTLEES

SEQ ID NO: 4647 - protein, 520 aa, Cyanidioschyzon merolae
MCRDVPQMEMVEIPDKFFDKTFIRHLMLGTEKGRMENERVHALHEKHPFYSFKGTRYKGDRDVYDYGAMKYLTNLKNRLTENLERSMIRAVVALYPGQSRQGKWAIIIGITKDRKHEDEIELVDKKTSRKRKNEASVIRAAIHEYRTVLGASTWFQCARSSHICDYRLRRPLRHHEGDQFRAQCQQGGVLRAKKKFTGMLETDGATICVHYRRLKKDRPVPPSAESSAKHEENKEANPETQKLQDDDLVVGADNDLVVPADPGNTNIITIVVPKHAEDGTDGNLRQKDTRVLRFSRARNYRESGIMNARKKIETWDAGMKDQMEALSELTSRRTDVEAFRKFMEVRIAHWDARGRSRIFFNKLSALKENESQRLVVAYGAGRWASRKGTTPAPTTRVYKEFARHFVTIPVFEFRTSYTHHELGCILQRVEMEKCLRSPEDIQKHVPLTEVQLERRAKVRGPLALVSTANDGKKRMECVNPDFNAAINTGKSAVLEKRSPEWTRGNFIGQPLKVALYKKKL

SEQ ID NO: 4648 - protein, 397 aa, Cyanidioschyzon merolae
MKYLTSLKNHLTMNLKSFMIRSIFALYPGLIRQGIWAIVNGNTNDRKREDEIEFIDEKKSLRSINEDSVIRAAIQEHRAVLGLANRAANISELKKDNERYYRLVLRYFVFLDRELERKAEMKLSEEKMKSGGDERLRFWADLATQKVQDNDFVVGADLGNTNIITIAALKRAEDGTDGKLRQKDMRLLRFSRARYYRESGIMNARKKIETWNAGMKDHLEALSEVTSRGADFKAFREFMEVRVAYWDALWEECRKPRWARLRMNLYGGRQRAFAKIFNELSALKENESQRLVVAYGAGRWKTQKGCAPAPTTRVDKECARRFVTIPVDEFRTSYTHHELGCILQRLEMEKCQRSPEDIKRYGPLTEEQMERRAKARGLLALVSTINGKKRMEFVNRD

SEQ ID NO: 4649 - protein, 659 aa, Cyanidioschyzon merolae
MYRDVTHMQTVEVPDELFDTTFIRYLMLGTGEMRRENERVHALCQKYSFYSFEGTRYRVDSCIYEYGAIKYPTNLNKHLTVNLERFMIRAVFALYPGISRKAIWIIIDSIKNDSKNEQVIEFVHEKTLCRKTNEASVIRAAIQEHRAALGLASPAEKISELKKDKKRYHRLVLRYFVFLDRELERKAEMKLSEETNEYWERRKPVLIGQRFNVAPMSNIKSHFLTIDSGVVHGIMREISPEFNVNREEFSGENRETHWKNIFDSKRLRVSKQKLFTEMIETDGVALCIHYRRLKRDRPVPPSAAPVTKDEEKEEAGPATQEVDDNDLVVGAAEHEDEKEADPVMQEVEDNGLIVGAVKLDENKKADPATQRVQDNDFVVGADPGNTNIITIAAPKRAEDGADGNLRQKNMRLLRFSRARYYRESGMMNARKKIETWNAGMKEHLDAMSEVTSRGADFEAFREFMELRVAHWDALWEQYTKPRLARLLMNLYGQRLVVAYGAGRWAPKKGTTPAPSTRTYKECARRFVKIPADEFRTSYTHHELGCTLQTVEIEKCQRSPEEIAKYGPLTEEQMERRAKVRGLLALVSTTSDGKKRMESVNRDCNAAIDIRKCAVLEKRPPEWTRENFIGQPLKVELYEKKLEAVVGGRSQKSGRRLHLG

SEQ ID NO: 4650 - protein, 1301 aa, Cyanidioschyzon merolae
MQERRLYDEKVVKAGLLGHIKDPYRENLRDAIRNRVDSYSKSIVKASSGLMHSAREMYRDVTHMQTVEVPDELFDTTSIRYLMLGTGETRTENERVHALHEKHPFYSFEGTRYRVDSCIYEYGAIKYPTSLNKHLTVNLERFMIRAVFALYPGISRKAIWIIIDSIKNDSKNEQEIELVHEKTSCRKTNEASVIRAAIQEHRAALGLASPAEKISELKKDKKRYDRPVLRYSIFLNGELARRADMEQGVEANAVPEKREAALLARHFNVDIMKEICPDFDVSREVFSGENRETFEIEDILLRFQTPQSEQAKAIRGDDRNRWRSHHEDEKEAGPATQEVEDNGFIVGADNDFVVGADPGNTNIIAIAVPKRAEYGHDGNLRQKDMGLSRFSTARYYRESGIMNARKKIETWNAGMKEHLEALSELTSRGADFEAFRNFMEVRVAHWDALWEEYTKPWWDRLRINLYCRKQAAFKKIFDEFSALEEDESQRLALANGAGRWAPKKGCTPAPTTRTYKDTTNGKKLMGFLYRDFEAAINIRACAVLEHRPPELTRENFMGQPVKVGLYEKTMKPVAGGRARVTRHYYTSDRSNVWWVKAARLISSAVLEFIPQLRELLRIAISRQVSRVFAGTYGSSMETKASRVAFPQLAALGSLHGQLGDVLFHGRGKARRTSTPASAVSSSCILAAEAVPVAAGVAHPVLRGAHLRAHCCGQGADAPVGSSTAAVRKAVTYTVLYAASRFGMQLLNDGQRYAWLTVSQTATRAIALTTFAHLHSLSIDFHWQRRTGEVIRVMDRGVASLGEVLSVFVFTVFPTAIELLLVLWVFFAMGSFWIAITVLVSVLVYGVYSKQLTEWRTSYRKLYNERDNAAEARMVDSLLNSETVKLFTAEAREVNRYTEAYVALQESERTLIATLGLLNSGQSVIISLGVGISMVMATRRVARGEASAGDLVMVNAYILQLYQPLRWLGSAYRQIMRALTDLDKLSRLLALEPTVRDLPGAPALRRRHGQVEFHQVTFHYDVLWSGTEPGAATRAQMPSTATDTATATSSSSGGGGGAGGAGGVHNLSFTIPPQRVVAVVGPSGAGKSTIVRLLLRLIDPQQGAVYIDGQNIAHVSQQSVRHAIGVVAQDPVLFNETIAYNIAYGVDAAATPACIEAAARAAHIHDFITKLPDGYQTVVGERGVRLSGGEKQRVAIARAILKNPSILVLDEATSALDTATERAIQANLMEMRTGRTTLVVAHRLSTVIDADEILVLNGNGEIVERGAHAELVSRPQGAYRAMWEAQARAQVTTSDSVPSTTA

SEQ ID NO: 4651 - protein, 997 aa, Cyanidioschyzon merolae
MHLARGMYRDVKHMETVEIPDEFFDKTFSRQLMFGTGEAPRENERMHALHEKHPFYRFEGNRNKGDWGIYDNGAMKYLTNLKNHLTVNLERFMIRAVFALHPGISRNGKWAIISGIMKDRKHEDEIEFVGEKASNESTSEDSVIRAVIQEHRAVSGLTNPAENVLDLKKDKERYYRLVLRYFVFLDRELECKAEMKLNGTKNEDSGRRKAALLGKRFNVVPLCNIKSHFDTIDSRIAHGSIKEISPEFDVRRTEFTGGNRETYWKNIFNFKRLKVSKQKVFTGMIENNGVAMCVHYRRSKVDRPIVPFASPSAKHEESKEADPVMQEVQDNDSVVGADPGNTNIVTIAVPKHGVYGNDGNLRQKDMRLLRISRARCYRESGIMNVRKKISAWDAGMKDHLEATSAVTSREADFKAFRKFVEVRVAHWDALWEEYTEPRWARLRMNLYCGKQRAFANFFNELSALKEDENQRLVVAYGAGRWTTQKGCTPAPTTRVYKECARRFVTNPMEKCPGSPEDIAKYGPLTDEQMERITKVEFVNRDLNAAINVRRCAEPFMGPAAAQPPQLAAHGLDESGSFRDSGTGVFEDSYTAQGGFAELKAQPLSEASMPRRKHQTERGKLGRVDGLFEEAPPGDSVVIDTVTAENGSSSARRRFEWRLALRRLTFRLSAAVGAGCLQRHGVAATNACFTPGYRDRSPFGTAVSRGVSAHHRDDAVRARRNSDHRYGPGGSHWNGRWLEFGLGYPAPARYPGDNARHAPASDGTACWWATSDRTNCPIFVIRHHDMLRIGAGIEQTQFHPNDWRAGTAYRRAKPSGCSRRPADSCVSTSATRTADGTAHNGHDLAGCTDDSDRGRELECVYSAIDCAVALNAAFFINAAILITAASSFWANHVQVATLQEAHALLERVLPIRLWGRVEVAPLVFGIALIAAGQTFSADVATAITDAAMRGRAERAGYHPTWAREHLQALNSFPGSSIASAAIRDCAHDSIHWEQGTHG

SEQ ID NO: 4652 - protein, 882 aa, Cyanidioschyzon merolae
MRLLRFSRARYYRESGIMNARKKIETWNSGMNEHLEALSEVTSRGADFKAFREFMEVRVAHWDALWEEYAKPRWARLRMNLYCGKQGAFANFFNELSALKGNEGQRLVATYGAGHWMTQKGTTPAPTTRTYTECARRFVTILVGEVRTSYTHHEVACTLQGVGIEKCQRSPEDIKRYGPLTEEHMERMSKVRGLLALGSTTSDGKKRMEFVNRDVNAAVNIGKCAVLEKRPPEWTRENFSRQPLKVELYEKNWNQYDTDLSSLECSVGDDRLSDTALSGLVSPRAGSPPLSADSEELAPDRTPESLDWMQLVAQLARLCRVEERGDRSSGTVLSQPSEQCLALEEVHPTDLNATGQPPVTSTNANPWTTQLEHHLNCLICAELPREPLLCPSCGVLFCERCATKWWREPSTASSQGHRRIASTQPCPHCRQPVARHELVLVRCLRELLQNIRRGPKLALPEQPAEKNPGAPRSLSALKATLWCCSVHAHEAVRYYCQRCNRFICAECCAPLPECEHRYHPLERAHERLQSLASELEQGLQPLRERLQRFECQLLEYEQTSRFFLRQREALSQRIQRFMDSVLEQIDTQVQQRIQSQQAARTRLVDMRMHLRRLLRDMERRLLAYRQDIAGHYAERAHALPSSAESLLRAHQEWKERWEALSALSVIDASDAVCSAWSESAGTTMLVALPEDQAPIPLKCAVLPPFAWARVPGTLKVCGLRWQVQWMDACSWDATRSPRIPDRKTPPRAQRPTPSDGVAAHAGPLARSESRGLLVKLEHRPGLEREPEDIRLQLEFVVMHQQRSVWGGLFSVNATDGWQAMLDVPDTVVVLVERARCPQDELQVGLRFPDIVEHSKQQTAYIQWMEQRQAPDQESVDRSRSAI

SEQ ID NO: 4653 - protein, 1175 aa, Cyanidioschyzon merolae
MTSHGRKNKDSFIRAAIQEHRSVLGLVNPAEKVSDMKKRWRKMLSPHAALFRVFDRRLERKTEMEVGAGHKSRVGATEGYPSGEALQRLSVMQHQVALCEYRLQSRSWHHEGYLNGARCKQGGVHRGKPGDVLEAYLRLQTCQNEQAKVCIGISESDGVATCVHYQRLRVNRPVPSSVSPVAKHEGNKKAGPTTQEVREHDFVVGANPGNTNIMTITVPKLAEDGIEGNLCQKDTRLKKIETWNARVREHLEAMSEVTSRGTDFGAFREFMDVRVAHWDALWEEYTKPRWARLRKNFYCGKQRAFANFFNQLSAPKGDESQRLVVAYRAGRWKIQKGCTPAPTTRVYKECARRFVTIPIDEFRTSYTHHELGCTLQRVEMQKCQRSPEDIAKYGALTEEQMERKAKVRGLLASVNTTNGKKRMEFVNRDFHTPINIRRCAVLEKRPPELTRANFVRQPLEVDLYEKKLEAVVGGRAGFSPLLYTAGINVFLLKGVCFQEWMSSSNTGVRVPAAASDVESTDTGYEQDEEQLPNQQDSEATDPEVQFDGGTDWLNSSEAEPVELSRAYSAPEPLDEGPKPNLLDISSAWGQDFVERADSELESYAEEHPGPEEHGASQQERQRSRSYLRALRAKMDRTWRADWTHRLGRTLDGTVDRARPYWRHLRSSSGLRRRVLSRSPSMLLQNLNHSRKIIARKSVEAASEAAEFISSPTLLFRPAKMAFAIAFPLLIPLLITPWRILLILFVFYAVWYLVVAAIFATEVMMRPPWYRVGLGGQLPMVEIPPYWRGVCHNPKQDLQLDYVSVSFESLHPPRRTLRGWYIPAESTGMTFESGSEQSAPETGAAKPSEASSADAPNPHATTPSGEHATTSRSRGTTSTGRTCVVCVHGAGRDRRNFLRHAGALHRHGYDVLLFDLSEHGLSDGSGRGTTFGAREKYDVLAAIAYAYNALQAERIVLLGTSAGASSCLLAAAEWIRLHRFLKLQIVGQRHESSQALSEQHSLDFPVQCIIAENPLARPDELFIFHLERLSLNYLPKDSYHLARKTLFWFASRVLLFRLAWVDREPSAVPGSHLRRLWVVISTLSRVLGGRTRCGAVDVMTDIHCPLFVLHGTGDEIVPVDHGMRIFAAANEPRQLWLAPDAAHCALFDQYPTEWENRVVDFIEKSLSEESNAKSRS

SEQ ID NO: 4654 - protein, 357 aa, Cyanidioschyzon merolae
MCVRYRRLKKDRPVPPSAAPVTKDEEKEEAGPVAQEVQDDDLVVGAAKHEDEKEADPVMQEVQDNAFMVGAAKHEETKKAGPAVQKVQENDFVVGADPGNTKSITIAAPKRAEDGTDGNLRQKDMRLLRCSRARYYRESGVMNARKKIEAWNEGMKDHLEALSEVTRRGADFEAFRKFMEVRVAHWDALWEEYTKPRWARLRMNLYCGKQQAFANFFNELSALKEDESQRLVVAYGAGRWKIRKGCTPAPTTRTYKECARRFVTVSIVEFRASYTHHELGCILQRVEMEKCQRSPEDIAKYGPLTEEQMERRAKIRGLLALVSATPNGTKRMEFVNRDFNAAINIRRCAVLEKRPPS

SEQ ID NO: 4655 - protein, 662 aa, Cyanidioschyzon merolae
MVGAAKHEETKKAGPAVQKVQGNDFVVGADPGNTHIITIAAPKRAEDGTDGNLRQKDMRLLRCSRARYYRESGTMNARKKIEAWNEGMKDHLEALSEVTRRGADFEAFRKFMEVRVAHWDALGEEYTKPRWARLRMNLYCGKQRVFANFCNELSALKEDESQRLVVAYGAGRWKIRKGCTPAPTTRTYKECARRFVAVSIVEFRASYTHHELGCILQKVEMEKCQRSPEDIAKYGPLTEEQMERRAKIRGLLALVSATPNGTKRMEFVNRDFNAAINIRRCATVFPPLLYTPDVVQVRTAFGARVREHDLPTRFPGKQRVGVEEIDMHLWFRWFFWFTVFWVLLLILASHRVLQTLMVPSPGLETSSPSEYRSHTVNFSWQAPVLASLFNEKPLAEYFQNISDLWRREQEQSFVGVIVFAKQQRLLCSIPKAGCTAARAFALRETLGVVLDPLDADEIHLIHPQGRANLTQLLHLQDEELLRVLSDPSWKFGALVRHPLTRLLSAYLDKVKAGRELERYPLKNRYPHSFERFVDYLEEAAKTMTPDLTPFDEHWRPQSGFCLFRMLPRTFFDCIGKVDEPESLRKFYVDMFGQAGLEWHESMRKRAQASGRNTLHSQSAASLLHKHVNERLAQRVRKLYAEDYERFGYDLWPPYYRKASATL

SEQ ID NO: 4656 - protein, 392 aa, Cyanidioschyzon merolae
MKEVCPESDVRNIEFNAENRETYWMNIFDFKRFHASKQKVFTGVIETDGVAMYVHDRQLKADRPIPFLLSILTKRGEKEAGPAAQQVQSNDFVVGADPENTDTVTIAALERGGNGIEGNLRQKGMCLLRFSSAGCYRESGSQRTPSSDQPGDEPSGGRSSFSGIRESSRFSVRGAVERVHKAPLGSSAYQLLLWEAACIRQLFQRAERPQRGRESKARVAYGAERWASKKGTTPAPSTRAYKESARRFVTIPTDEFRTSYVYHELMCTLQRVEMEKRQRIPEDVRKYGALTEEQMGRRAKVRGLFALPCTGGGKKRMESVSRDLIAAISIRRCAVLKKRPAEQTRANFAGQPFSVEMYREMLKPTEAGRSRKTGRRLRVDIHLPLMIVGHCA

SEQ ID NO: 4657 - protein, 729 aa, Cyanidioschyzon merolae
MEQRALPCATDRVDDVGIAQTKPLLVRSSAGHQDAGGYRGEAFAPGNGIPAAKSAPELHARKRSTFVDAVKHEDEKEADPSTQKVHENDFVVSADPGKTKIVTIAASRRAEDGTDGNLRQKDMRLLMFSRARYFRKSGIMNARKKIVTSRGADFEAFRKFMEVRVAHWDALWEDYTKPRWARLRMNLYCGKQRAFANFFNELSALKEDEIQRLVAAYGAGRWKNRKGTTPAPTTRTYKECARRFVTIALDESRTSYTHHELGCALQRVDMEKRQRNPEDMKKYGLLTEEQMERRAKVRGLLALVSTTIDGKKHMEYVNRDCNAAINIRRCAVMEERPPALTRENFMGQPLKAELYETKFEAEVRGRFKKTGRVARHYCTRSASFDSRMAFSGSSPERERSGSWIPNGSESFFGSEGSEAPEGAEGLGTVYTPVLNAAQRAKLEALSELVRSAAELNLTPTEKAWMDEACLSRFLRARRYHVQKAFRQLHETIVWRRSFGVEQLMLDPELADVKRQSETGKLYVHGKDRFGRPAVFMKPRLQNTSERKTAHEQMRQLVYTLERAVAEMMPPVEKICLVIDFPGYSLRNAPSIKVQRQTLKILQDYYPERLGFAVCIDAPAIFWTFFEIVKPFIDRRTSAKIQFCSRKAKEGTKQNMRTLMNQLFDPEALEIELGGRSAWRYSNEEYFRERVLPEYLRIKSYPERVEMIPCAEEDVNNTQDVFYDSMSCLD

SEQ ID NO: 4658 - protein, 385 aa, Cyanidioschyzon merolae
MQKVQDNDFVVGADPGNTNIVTIAVPKRAEDGADGNLRQKHMRLLRFSRARYYRESGIMNTRKKIETWNSGMKDHLEALSDVTNRGADFEAFRKFMEVRMAHWDTLWKEYTKPRWARLRMNLYCGKPRAFANCFNELSALKEDKTQRLVLAYRAGCWKTQKGTTPAPTTRVYKECAGRSVTIPIDEFRTSYTHHELGCTLQRAEMEKCQRSPEEIAKYGPLKEEQMEWRAKVRRLLALVSTTSDGKKRMELVNRDFNAAINMRKCAVLEERPPELTRENFIGQSLKVDLYEKELESVVGDRSKKAGGVWTSVGDVLSRARFSRHYCTPLASFDFRTAFGVAMRGKTSIIPSTSESHSPCFFSDILVDSYTLSSDRACLAASAPVV

SEQ ID NO: 4659 - protein, 904 aa, Volvox carteri
MALNCDLSAFTIDQLMDALQDPAQTCENIGILRNEIKQRVLTVLSTVVAVPDVTPVVELVFACVKGQFRKFNMCGGNVADKWKKQGWIDFAKANDVDLSATAPAAADAQSTVHVSPPEMPKVPEAATTCKDSTPASGAPPGGTSTHGCNAVALSVVKCALKKAMSLTDEEFGMFSAQVEELVQYDTTSVKRVTNYQPGARARITVTRDKTTKEEKVTLKVTGYEAKVTEKEVSDFNQPDGLDQVIQYAGIGFKTVVLNNVWYPLFARLGRLTKAYMHQMCKKHHHKKTPWSKAHAVVQLIRSGKPIPAWPAYVVAYIKNARAKLLDAAGSTMYGSLNGHALQARQDELLSAHENKYLWDDHAKKKMTFQAAMQFNFWMQKQFESLHQKKMRLMPVFAVKRSHVRLDTKSLLHIFCSLFPNDHNVKLMKSFWNQDAFLEKCGLPGSAHPDTYMLPPKPPDGTTDKALLAQYQSACSRIRNTDAYRSQQARHRALSETEDRVVKSFFRCLPVKNGYKFDCSISTDGVAVSLQYSKPSKAVTAKRKRSAGMRSSNVATDAYDQNLDMYDPEEGVLTLGLDPGRCSLATVSVVTQYTLDSTGKLKLGEKLNRHSWSLLRGEYQHKSGIRTSTIKKAQRDAPLQPAFQALAVPGCALRTAQSGTVLRYIADSQHCMNEWWERALSRQEAMASFQGYIGKRKALDSFFSRVLKEAKKLVPKRTKIEVAYGESGITMSPAGKGEVAVPTTGTFKACQRCFGKSAVVPTNEFRSTMMRWESGSKTHAVYKEFRAAEGQDCVKEVLHGTDQKHGSALSASDPRLPFVVAWQARRASKDKQRRGAVVGTTEAEFESATGCNVTFPMVQGNAHVLQPGHPRSKHHRSATHHGAEGAGTPGSVLPRGQSMTVLLCE

SEQ ID NO: 4660 - protein, 339 aa, Eremothecium cymbalariae
MKLKHLREVTPLKKNYNYDEDPKITYLKQVPFLIKDNGLRDFDKDYRTNLAKSKKSLKPFKLHFKRIRDKQSMAVEKKVWGLSRGIFYDLFNAKTLRSTEPLPEKLPHDSRLIREYRKWFLVIPFESKVQIPKPDQSVNAVAIDPGVRTFLTTYDSSQKVLEIGEDGYLKLQHLDRRLRSLQSDIHKLRSKCALPKQYRKLKIRNRRKVIRRLYQKKKNLANDVHRKASSLLASKYNYILIPVLNFHNFKKANRRVKANLANMKHCLFVQRLKNKARHYENTTVIEVDEEFTTKTCSSCGTRSNIGASKVFKCGNCESIFDRDHNAAKNILLKYLGEIA

SEQ ID NO: 4661 - protein, 472 aa, Saccharomyces delbrueckii
MTTSTQNQAKKRKTSKKNTSRPFWNEDAAHHSKQWSLNTMLPMAAKKLSQKINSDSWXKHPQTPIINHSLKLPLSSAVKEEITRARNIRIYPTNIQKETLKKWFRCQRYIYNKALKMHNDGMLMNIKILREKLLNKKTSVFEPEEQWLSEYHYDLIKNYISNMAKFKKTRAPFKLKFKTKKAPVQTLSVLKKYWNKGEKTFYSDIYSFSSMRGAEPLPEELPRDSRLQKTRNNLVVPMAGEQIARKSPAEEFIFIDPGVRTFMTGYDSNQNVVEIGKDAVVRIEKLKRRRRQLQSKLAKLRKHKKSQNHRKALHRLDGRISHIVQDMHKKSALFLCKSYDNIFLPKLNYHECTKLTRKSRSNMATLAHCSFHDRLTMKAEQLRGASVHEVEEDYSSKTCSSRGNLKDDLGSAKVYSCIKCASVFDRDFNAAKDIMLKYICEHLMASGESSITSASSGGNGGFAMMGPGPFVR

SEQ ID NO: 4662 - protein, 399 aa, Copidosoma floridanum
MSVSVFDLSKVAEDKKKHTFAWRISCNDVEVSVHLYRIRADQSKSGRSANLNRYAKLDKNERDARAEEEVKKKAKKKTTKDGNLNSADYQRQKYTRYVGVDPGLITSFATYVVDVAKRNEARQSRTCVDPRGTDEFEMVSSRWFRCESGYVTRKWRSKHYMRQITAEVADLGHHFPGLILQRRTDDYTTTRYRLNYYKTIGPLMRKKFWSRQMFDRKIRALSLVDQLVNKLVYGDYEGEERKAVSTFMALGKTKFGNRIRGHTRIPMLLIVKRLEDLAKNHPENLKIYRSDEYLTTQLCAVCSKQMDVGTGKNSRRSDCLNLVRRGQRRIKCSKSWNRDQVAAKNILQNAILACGLPEGPRDLRHPQNFERPKRREIVTAMERRVLEQYGYDEEVHEQS

SEQ ID NO: 4663 - protein, 999 aa, Auxenochlorella protothecoides
MALLACRHAAVIAWNAYKWRDPLPEDAKVHLYVGIDPGRTKMFTAVDEHANVTSCSSKEFHAMSGSKRREKTMAKWHAKAPPYVKKLHQCPTYKTASTEVLLSRVAWIVPTLRQGLTWHRDEKPFRKLHHQAYVGRERAINRLAEQFRPPPGMTTVVGVGNWVVVVDEHRSSKLCCACHATLHAHQYVRVRRGEEKLVDVWDTKRCVNKGYRVHVVNRDVNGAANMLMLTKRDPLPEDAKVHLYVGIDPGRTKMFTAVDEHANVTSCSSKEFHAMSGSKRREKTIAKWHAKAPPYVKKLHQCPTYKTASTEVLLSRVAWIVPTLRQGLTWHRDEKPFRKLHHQAYVGRERAINRLAEQFRPPPGMTTVVGVGNVYVRVRNGEEKLVDVWDTKRCVNKGYRVHVVNRDVNGGVNMLMLTNGSATRGLIGVQGPRPALRRSGVPTRPARRGAAVTRAAKQLHFNTDGEALKRMQAGVDKLASVVGVTLGPKGRNVVLETKYGSPKIVNDGVTVAREVELEDPVENIGAKLVRQAASKTNDLAGDGTTTATILAAGIIQEGMKIVAAGVNPVQVIRGLERTVTHLVAELAALSTEVSDNELRDVATVSAGGNAVIGELIASAMARVGRAGVVTMEESKTAEDSLQVVEGMQFDRGYISPYFVTDPERMVAEYEGCRLLLVDRKIATARDMVGVLEGAIRGGYPLLIMAEDIEQEALATLVVNKLRGALKVVAVKAPGFGERKTSYLEDIAILTGGTVVKEEMGVSLDGAGEEVLGTAAKISVSKESLTIVGDSSTAEAIAARVRQIRNMAAETEAEYEKEKLNERVARLSGGVAVIQVGAQTETELKEKKLRVEDALNATKAAVEEGIVTGGGCTLLQLAQRIDAFRGSLDNDEQRMGADILRRALPYPLKLIASNAGDNGSVVMQRVLDGGSPAFGYNAATGAYEDLLAAGIIDPAKVIRCALENAASVAKTFLTSSVIVTEIPQEEGAAAAPADGGYGGY

SEQ ID NO: 4664 - protein, 746 aa, Auxenochlorella protothecoides
MDVDVVAADDAPSTSRPLASAGQDSQTPPVPLGVVNKLDDAEKREQQWQNDATVNEWRKAPGEAGTLGRFRKVCEDLAIDDYATTSIKTTWNGFRDLPKKKTKKKEKKKEIKKKAQQQQPVLDALRPTVDDVVAVISELRTVGDLFANFHAIRMVEEFERRKQADRADADAALQPLDEIFFARCMTLIWRPRKAASTNAGAGARAAFTPLAESVALFRETLERTGVTLQPPDLEHIRPFIDEAAGDLATATSTYYKRELLRHLQQNAKLELGAKGNWPRHCARAVLSTPGDAPQGQAGEEATQHDANCPDVSELKRKVEERAKQHAANKGAGIPSKRRGLGKQRRAALAKRKEAAANAAGGPAKGPQQPVQERHIGRLFSLLPCRQSFEAVHITGTLTTLGALLRRHEKRNKGGVARMTRLQLSTEKEWRMYTVPEALKFLNLEEVHGIPARKKQAIEACLRRKAEEYQVDAEGKRGKKKTGETGEKKTDWFVHTSGKRTRGGAPLGAPQGRGIADEYYRRDPPPEDARIDKYVGIDPGRTKMFTAVDEHANVTSCSSKEFHSMSGSKRRERAIAKWHGNAPPYVKKLYQCPTYKTASTEVLLPRVAWIVPTLRQGLAWHRDEKPFRKLRHQAYVGRERAINRLAEQFRAPPGMTTIVGVGNWVVVIDEHRTSKLCCACHTTLHAHQYVRVRNGVEKLVDVWDTKRCGNKACRVHAVNRDVNGAANMLMLVKSHLREAAVQSAQAR

SEQ ID NO: 4665 - protein, 579 aa, Auxenochlorella protothecoides
RNRPPEDAEVHLYVGIDPGWTKMFTAVDEHANVTSCSSKEFHAMSGSKRREKTIAKWHAKVPPYVKKLHQCPTYKTASTEVLLSRVAWIVPTLRRALAWHMHEKPFRKVRHQAYVGRERAINRLAEQLRAPRGMTTVVGVGNWVVVVDEHRSSKLCCACHATLHAHQYVRVRNGVEKLVDVWVTKRCTNRGCRVNVVNRDVNGAANMLMLTKCFFANALRPTAFVTPSLLHPWPLPGLPPGLELFIKRDDLTGMQLSGNKVRKLEFLLAKAKAEGHDSVITIGGIQSNHARATAVAARYCGLDSHLILRTSRLAADSDPGLVGNLLVERLVGAHIHTVTKEEYAAAGSRALTAQLERQLRGQGANPYVIPVGGSNGLGTWGYLSFVEELRGQAADLGLTDIVLACGSGSTAAGIALGSHLAGLGVRVHGYAVCDSEDYFYAFIDDLLDQVAPAEARGGAGARDLIRIAEAKGVGYGISTDEELATVLDAAQATGEAPNLNPAPNPTFSLSSAGIILDPVYTCKALHGWLADVAADPAAWAQRRVLFVHTGGLLGMYDKAEQLQGPVQALQRAHRLHVQS

SEQ ID NO: 4666 - protein, 530 aa, Auxenochlorella protothecoides
DAGTPSKRRGLGKQRRAALAKRKEAAANVAGGPAKGPQQPVQERHIGRLFSLLPCRQGFEAVHITGTLTTLWALLRRHEKYHPGGVEKLTGLQLPKSDDWRMYTVPEALKLLNLEEVHGIPARKKQAIEACLRRKAEEYQVDAEGKRGKKKTGEMEEEKKTDWFVHTSGKRTRGGAPLGAPQGRGIADEYYRRDPPPEEARIHKYVGIDPGRTKMFTAIDEHANVTSCSSKEFRAMSGAKRREGLIAKWHADAPPLVKKLHQCPTYKTASTAVLLSRVVWIAPKLRQGLAWHRDEKPFRKVRHQAYVGRERAITRLAEQFRAPPGMTTIVGVGNWVVVVDEHRSSKLCCACHATLHAHQYVRVRLGVEKLVDVWDTKRCTNRGCKVNVVNRDVNGAANILMLTKPLPLVGACRRNSLLSVAALGRDRDDKKPKDSAGKKPQGNWRQFSPKSEKPGRQLLDTLELVYATTQWPSDDTIQSFWVLHRMPRHQVVEWFAHRRRQERVRPQTWEADPSNDYVRIAGQEEDPGRG

SEQ ID NO: 4667 - protein, 623 aa, Auxenochlorella protothecoides
ALKLLNLEEVHGIPARKKQAIEACFRRKAEEYQVDAEGKRGRKKTGEMEEERKTDWRDPPPEEARIHKYVGIDPGRTKMFTAIDEHANVTSCSSKEFRAMSGAKRREGLIAKWHADAPPLVKKLHQCPTYKTASTAVLLSRVAWIVPTLRQGLAWHRDKKPFRKVRHQAYVGRERAITRLAEQFRAAPGMTTVVGVGNWVVVVDEHRSSKLCCACHATLHAHQYVRVRNGEEKLMDVWDTKRCTNKACKVNVVNRDVNGAANMLMLTKSWMLTQPRLQQDLVRRCSSMWEMAVATALRRMRHAPQCDATTHHADTKTCMHCGTTKELAVFRGSKNKTDRLQNRCKECEVALGRGAKRDKNGPLVVRVEQKLCRRCSEVKASDLFFHSKLSLDGLCTYCKACQKELNKQARAKRPDVLRPQVQEKECRHCGLVKPADQYFKSRMNTDGLYSYCRSCATLLNSASKKRRRAQLRSDRGAGAAPAAPRHIQNSQQRSSEGAAGLHATAPALLGSSFPGYSGGGLVLPAGLYPTSAPPAAGTLAEPLHGQYRAQPPHGGGMLQEYALIQAMTLAAGLDPSDPDATSQIQAALAMQLAMAVAASGSHSAVAAAGGHARPTPERGGELG

SEQ ID NO: 4668 - protein, 1154 aa, Ziziphus jujuba
MSKDNIREHSAPVYEGIENAPARSMMRATGFQDADFERPFIGIASTWANVTPCNMHIDGLARTVEQGVSAAGGKGIIFNTITISDGISNGTEGMKYSLLSREVIADSIETVVGCQAYDGVIAIGGCDKNMPGCIMGLARLNRPGLFIYGGTIKPGEGHTDMISVFEAVGQYAKGEINAIQVKHIEEVSLPGPGSCGGMYTANSMASAIEALGMSLPGSSAQEAVSEDKQIDCARAGEAVMNLLRLDIKPRDIMTKAAFENSIKVLIALGGSTNGVLHLLAMAHTAGVELSLDDFVRIGKDIPVVADVRPSGKYLMSELIAIGGIQPLMKRMLDAGMLDGSCLTVTGKTLAENLADVQDYPEGQQIILPFDAPVKKDSHLVILKGNLSPKGAVAKITGKEGLHFAGPARVFEGEQGAMRGILDGEVQPGEVVVIRGVGPKGGPGMPEMLKPTSAIIGKGLGASVALITDGRFSGGSHGFVIGHVTPEAYDGGPIGLVQNGDQISINAETREMTWHVDEPEIAARQAAWIKPKPNYTHGALAKFAKLTSACLQQKIRDLAQAWGKFYNKKEQARLKQNKRKPRKPNFFKLADGGEIQLRPLMPRFKKKSDGEQSFRLPFADCEQWRGGLLVKVDPKYTSQTCSSCGHVAKENRLTQANFSCVECGFSENADINASRNILAVGHTVLSVEGRCGKDRPVKQKASEIREEIQFFELHTVIFVEADLMSLLRRCYLAVQQLPQLEEILSPELKPLKVIISSEHAEAPNQMSFDEWQHYTINDAKILSKQHRFSFHDTPELPSAEALKQAELILRHTPLRGQDFLYLLEDVFHMLWQKQTGKLRTLYAMASRHHQPQDFPERIFDQTPILASYFNLGGRQYQAVDDLLRLTRRLEQQKLLTGNPIFMIDHIEWREHLISDAEELNEIQSMDPELDLYIALEDPISWLLLAYIKEELADYYNIQLNVYPLSYRGRDEFDWSLATRLSKRTDVEFTPFCRPTEQAIAPMAQLFYSCPEEQRIEAMYQILQAIWIRGEDLSYAPHFKHLQQQLNIVDLTQDDILAKLQDNDMLCEMKSQPNFPIDAIDTALVELIAARQFYVDQTTRFKKTETDLQSPERMEQIVENVRALAQKQGLDQEFIEHLYREMFQYFIQRELKEFRP

SEQ ID NO: 4669 - protein, 226 aa, Phycomyces blakesleeanus
MQIDTRILCQQILRTTGTAKLDKLELCGRVTDGVGVSFLTQTQGTTKGPTSRRASIIKTENIYYVHNFDEYLAKTFRAKFGQNFVLVMENWSVPNNRYHKPIKGKILRNLLCKHGFDACLINEYATSRHCPRCCQLSLQTFKQVENPRPYRRTQIPTRTRHSLLRCTNLNCLENMDGSEVMHRLWNRDLAAVLNFRHILNQVSHDDTISERFTRVIQIGLNRIQAE

SEQ ID NO: 4670 - protein, 297 aa, Rhizopus microsporus
MLELPYKPKNSIKRKDTFEEKKNAKRARNSISSSTRGSICKPCGNIDHPFARSKEWPNHNFTLQELIERNFGSRYQRVVNENLSIEQLQLKYSRILFLVDTWIELSGTEGIDLTVKEDGLSNYGKYYQVHTSLKLHDFTSEEVDRYFRPCTVDPNRKDVFVSHHGNTGIRRLSSTEYYNMSGNHMGVSPNFYSFETARIKWCNYIGSQRAAENAVNILINGPAIPVSKITYKISCGNDDDTREIHQISICKSCDIYWNRDVMAAKNMFAIAESIWNGHGCPNVFKRHCATSNVVVSL

SEQ ID NO: 4671 - protein, 404 aa, Rhizopus microsporus
MGYIIDEERYALETATSTADEDAKHDVDVCMKEASSKRAYALYTDQDKVRFFKLMFVKVMSASAAAKQLGIHVRTAQRWAQMYKTDADSVFIKHKKTGRSRILHEEHKQVILEYINENPSSVLDMAWSKKGLPAVVTVPKTRAQTTTILGAISALGLIKCSLRLPQPPAKKRKRKGYVELTSIGTVIGHYFSFLKATMDEMDQCPHMKWYYLAMDSAPSSTVSVEGFGRFLQARSEQRAVLNRFYGHTTTNHDNGYSLFRKVRLSAYFNKQRADQKLIQDLRAKFGEDAVFVIGNWSTPHGRYYEPIRDLGFRRLLKKHEFQVFLIDEYKTSRPAMAAPDRYRLWNRDVAAFLNYMHILRGLRHNGMVSHRFRRVAVASTRHRRRVNDQEQPRIRIRLGDDSPS

SEQ ID NO: 4672 - protein, 377 aa, Rhizopus microsporus
MNFQIFFEDGHGNAVDEYGRPEPMVYIIDEERYALETVSSHTQYLHNQPQENNFDVGSVTDGDAKDDPDACMKEASSKRAYTLYTDQGKVRFFKLVFEKVMSASAAAKQLGIHHKKTGRSRILHEEHKQVILEYIDESPSAVLEQVMEQLLQKLQDLKVSKSTVYNFARTECAISALGLLKYSLRLPQLPAKKRKREGYAEQTSIGTNPDVVQAKPAVLSRFYGHTTTSHVNGYPLFHKIRLSAYFNKQRADQKLVQDLRAKFGEDAVFVMGNWSAPHARYHEPIRSLGFRRLLKKHGFQVYLIDEPAMAAPDRYRLWNRDVAAFLNYMHILRGLRRNGMVPHRFRRVAVAPTRRRRRVDDQEQPRTRIRLDDEYPS

SEQ ID NO: 4673 - protein, 586 aa, Rhizopus microsporus
MFKSIIQKKKEQVINKRKSTGNIDDTFEDMICKDCQEIGHANKSYYKCKFYKEASVDDVTDKRVTNSAALPEGLLENWNLFRQSHGSIIYTKKPASGTSQCLSESCVQLATTYTNCIAENFEARLLKYLSYLIQNTFVSMAYQDVKKIAYDYCYQSVCKGEPKWPQGAIFTQETKAAVDEACLPSQQLITTRVTLKELSASPSTFLPCILYILSKYEEEHKEHHAYDVRRLPLPRLFSVLPNPSLHWRFINISANSLSAFVKEPLPRGYNDQLRMFCRVFNFKKLRINSIDDLLPNQNNKIMFANTVKSDGFSVDFVFNKRTTKDTSLIANIDLKLEDFGLEEVKQAYQPMFLDPGRKSVFTAAIGLDTTNHQIRRCSTAELKAQKGIRTIETNIPSPKTSQCAAYLLYIEYILTHVGVLFTSYDYKTAKDRFYLYQGRQRAAEEMVNMLVHGGAKSQKWKPAKFQTEREKVPLVVFGAGMFGKDSIKLKRNRCGATGVFWRALKRREAAGDLIAVTIDEYKTSKVCNACNSDSLTGMPGLKGCSIQVCSICKTLWQRDINACKNMLSISLSIWDGRGRPFQYSRN

SEQ ID NO: 4674 - protein, 239 aa, Rhizopus microsporus
MFLDPRRKSVFTAAIGLGKVKHKIRRCSTAEYYDMTKSTKHLKKLENLKVEKGIKEIETNIPSPKTSQCAANLLYIDYILTHVGTLFVFYDYKTAKDRFYLYQGRQRAAEETVNMLVHGGTKSQKWKPAKFQMEREKVPLVVFGAGIFGKDSIKLKGNRCSVTGVFWRALKRREAAGDLIAVTIDEYKTSKVCNACSNDPLARMSELKGCSFLVCNTCKTLWQQDVNACKNMLSISLSI

SEQ ID NO: 4675 - protein, 755 aa, Rhizopus microsporus
MWKNYAEEQFDNITYRVKKESGKETMEQYEPSVSVPEEVPIRPFSTSLLPLLRSDLSVDIRDAFLDTINQAMASVSDYIIANDIQIWLLNRVITVLLRIHLPPKCERLKREKKSKRPAESPNGSFKMPYNRRRKLFRNENIKCEEYLQKAQNDKLNENRWLPKVQKSDMDIAKYKKSLQKERTTVNPRATLPAMSEDDEADALEITADIHLIAAQEVAKNEPFKNYHMTSNFQAIWSQGKRKIYEDALSDIKPDELHVCVLITNFLLPYLPSGDKLQHIMHQLSFFLMANDLFRCCGYTHFMVKLVPLTTPHKLLAFKLDASSLYAMFCSKNDEMEIFDFDYLQTKSRQVATDLTFAHNMLVLPGLRTARVNGYLKNQTSVDSLTSLQERHIKRKRGFIEHEQSKTKQQLSDAKQSMYSGVVRATPDEIAHQHKRIITRNDYKIMDEIEKLKVDKDFLISDKLKFSGTDNGLITMTETVSFRLQDSDFIWIYTTRFHFEVVFLKFEKPFKVKSEQVGYGSRAQKLRLQLQRAKKANAQRITSVENAASRKSIKKDESVARLEEWYQQAVRHRKQLRDFYYPPTTVRQKRTYELQRRRYIDKLCSSEHQYVTSSDKSQYIMFVGDRGYRVGSTIKGNLKYGGQWKPRKNSLYTSVCITNEHNTSQTHLFCFKELQYPLRVTGNTKLKAVNGTFQCVNPDFPSVLAGKAIHARDNISAMAIGLSGLTTLLFGAIFPQFDPKYSLSKTAEFEYLSATF

SEQ ID NO: 4676 - protein, 357 aa, Rhizopus microsporus
MSFQIFYEDGHGNAADEYGRPEPMDYNIDEERYALETVSSHTQYLHNQPQENNFVVASMADEDAKNDPDVCMKEASSKRAYTLYTDQDKHKKTGRSRILQEHKQVILEYIDESPLAALEQVMERLLQKFQDLKASKSTVYNFSAFHINLKRSMAWSKKGLHAAVTVPKTRAQTTTILGTISASELIKYSLRLPQPSAKKRKREGYVELTSTGTVTGHYFSFLKAMMDEIDQYPHMKCLFYGHTIKNHDNGYPPFRKVRLSAYFNKQRADQKLIQDLRAKFREDSVFMMGNWSAPHARYHEPIRGLGFRRLLKKHGFQVYLIDESKTSKCCPTCHNESLRTLRRVPNPRPFKMHQPIL

SEQ ID NO: 4677 - protein, 1782 aa, Rhizopus microsporus
MQNKKQDEAKDEAKLQSVFCPPLDSSLVTAIWNDTFNYDTSYEILSALAKEADQALDLQLSVEQLQLLDMDESCSTSATATTENDDDNVAFLLNCFPTHSVEELKDALMSQDNDVEKATDLLLNREFLQQAEDDDKRARAILNKKKRKKKKIIISGQLPHASSHSNNNNNNNNKDDPYEELETVPFNHWKQYDDIAKVLQPYFPNMPKFLITTCVQRCRGNVIASVKAIMEKAPDEKPEHVLNWESMKDLISLKKELEPLMVDRSAEEVHRVAVGTIIHYQGQGKTVEQLVQSAMEHFLTFDISQLDLEARLEKMAKESDMLRAKAKQRGIPIIPEYLLLNNQTNYVEDDPDECRNIAMELIIERNELYRKAAAAYRKARNKGPEGGVALYYSDVAREIDSKARDWNMRAARATVRRERLRQNDDHLLDLHGLTIAEARVVLKEGVTQWWSRSQMQSESTITNHDNGHPLFRKARLSAYFNKQRAEQKLIQDLRAKFGEDAVFVMGNWSAPHARYHEPIRGLGFRRLFVVFSFVIPLQNTLSFLKTGNNSNISLETPRSRSGSILRAISLHSNSSRYEDEESTSCNPEDFVIKNPIGYGSSAVVYNAIYKPKNMRVAIKMIDLDLFERNQIEELRRETALMALCKHPNLLKVYGSFVNGSKLYIATPYLSGGSCLDIMKSGFRDGFEEITIATILKQALEGLIYLHKNGHIHRDVKAGNLLMDDQGTVLLADFGVSSSLTENSEIRKTFVGTPCWMAPEVMEQSGYNFKADIWSFGITAIELATGHAPFAKFPPMKVLMMTLNQSPPTLNRDQTKYKYSRTFKEMIDCCLQKDPNKRPTAEKLIQHSFFKQAKKKDYLVKSVLACVPPLDERPHKRIAFKQTTIENSDQWDFDDTSPHEKSRHITFGNVIKNTDKAIGLPSPAPSEPEIGSPSFHRRSRFVIDDYTHPSDTTTTTTATTTTSTSAGPHRSISPNQYTPQPGNSSPMSSSPPQTCDSNSWQSSVGLGLGISHQQENSEIKKGRFSVNQASVPKPENLPFLATDPSQDIRPIPMSRALSNESTRDGRKSRFEIQHLSPQSSGTTTLGTTPPYTQDIRTEPLTRESSSYHQRSSSSSSSKIGRFSIEKEHTADMVHPHETSVQECRKKGRFELTGAPLPSERFESFAPTQQPGMQHHVETLLKQLEIQKTILFDILHTIPNRSRSPSIDIRKLSNSSLDNNAESYFQHKPIAARMTQPSTHNDITLHNQPPDTISFNTDATEQTTIVPNSQPVDVSNIPLPKDNYQRYLSVQNHNIVIPSYAAWFDISQVNTIERRALPEFFNNRNKTKTPTVYKEYRDFMINTYRMNPVEYLTITACRRNLTGDVCAILRVHAFLEQWGLINYQVDPDAKPSSVSPPFDSQFKVVVVDEVKKEEIPTDIKQEEQIENQKMSIVDIEKGKIPQTCVSCQKTCTEEQYCSTTRDNFFLCRHCYIEGNYPADLKGSEFIYFILEEENNIDQWTEEEESLFKEGCEQFGDNWEKVSEHVKTRTHDECILHYLQLPSKDPVDTLKLTDLGLLQYDLNQRNANPVMSVVAFLSSTVDPKVAAAAGQIEPEVTIEEKDTKTTEDDKPSQEEEEALYDLSHRLIGAKLSRFNQQISRYEALEKAVEEQKEVLEKERHQLEHESFSFKRKLMQIQVEMAKRTKLTATTATAAAAAAMNSITPAQLQQQLAVGNMNMFMNQQSPQLLQQQYQLQMQMQMQLQMQQQQLHLQQQQQQQQHQQQQQQQQHRGRPTGQGINTNMMSF

SEQ ID NO: 4678 - protein, 455 aa, Rhizopus microsporus
MARLFNIMMLKYALSVLWQRTYFQDFIPKKEKQLAESPTESFKLPYNRRKNLFRNENIKREKYLQKAQNNKLNKWLSKVQKSDMRIAKYSELLYKERTTVNPGTKLPAISNDDELATLDIAADIHPIASQEVTALEDEAIEIKTKQQLLGARQSIYSGVVRATRDEITHQNKCTITRDDYKIMDEIEKLKVDRDFLISGKLKSPGADSSLIAMIEMVPFSLSRLKFHLGLYNKTNRLRQWVTGASITTPKSEENKCTRITSVENAVSRKVSKKTKEFLDLKSDINKPQECTCDLQRRRYIDKLCSNERRYVISSDNSQHIMFIGDKGYCVDSTIKGHLKYEDQWKSRKNSLYTSVCITNEHNTSQTCLFCFKKLQHPLRVTGNVKLKIVSGTFQCINLECTSVLADMATHARDSLSAMAIDLSGLATLLFGATFLQFDPKLQNLNIPPLLSEKET

SEQ ID NO: 4679 - protein, 949 aa, Rhizopus microsporus
MQKPKKGPKQYQESKGKLDGRDVFIKEIPLKDLDDDWNKGMEMFEDSDKYVHKPCTTLVYDNKALIITNHSERYSLFDFLKHRKLKFLECLKLAEPIISGLIYLHCHNLVYCSLTSSSIILDENNTPKFRGAGLIKVGSNHAASKPASEDAFRWMAPEVLKGDPPSFKSDIFSLGIILWEILVDEAYPYKEAKDAALIKECVLGGYRDLFPPDTLPSYRKLIENCWQHDPNDRPDSIGLLGFIHAVKHDMKKQLGEVEEASIPNIIKHPGKLNHKDPADNLFDVAKYCFKMGEYGKARTWYEMAAEKGSASAAYEVAQMYMYGIGVEQDYDEAKKRYETAASIGSVDAVYAIGLMYNYDCGVEQNYQKAIEYYQQAGNKGSAMALYRIAEIYFYGDGVERDDQKTLEYLNRASKMGLPCAIELTGYMYAYGRGVEQNDSKALSCYYKAAREGCAWGMISLGNMYYDGTFVCQDYEEAMEWYQKAIDKSKSNDLXTVSLRTQYLHNQGQENNFDVGSIADEDAENDVDVCMNEASNKRAYTLYTDQDKVRFFKLMLEKAMSASAAAKQSDIHVRTAQRWAQMYKTDPDNENPSAVLEQVMERLLQKFQDLKVSKSTVYNFVRTECNLSLKTSWEFNGLILLINLTNGAELSTLIQKLSSRKKADNLDSVALFKLMALVSQFSRRGSIGKQVEITKRFLIDASLWTQEEEICSEQTLSQQPSSTVFVEGFSRFLQARSEQSTVLSRFYGHTITNHDNGYLLFRKACLSAYFNKQRANQKPIQNLGAKFGEGAMFVMGNWSAPHARYHEPIRGLGFRRLLKKHGFQVYLIDEYKTSRCCPTCHNESLRTFRRVPNPRPYQRERYSTVVCHGLLRCTNLYCRPTMAALDRYRLWNRDVAVCLNYLHILRGLRLNGMVPHRLRRIAVASTRRRRRVDDQEQPRTRIRLDDDSSS

SEQ ID NO: 4680 - protein, 533 aa, Rhizopus microsporus
MDEVSTPSSFYSSAMSTSSFLAPGDRILAVKSSVDGIGWNDLYRETLESFVERVHIITMHVYSFSKFIFLRESMALIGYRELINRHLDDYLTITNYQRPNFVFAQQSVIIEGTKVYTVYVNNAHLRFGQHLRRAVNALLRIRQRTADLRRDLSAQGMDDDEIKHRIRQDISLPAQTFKQAISQQPIDMKQVPQEPIYMEALITLRPVFDAYDRDYNFDEQRLYYNVKRNPVNHFKAFYQLSRLFILCQSILGIKWSNAVDKLDYWHRVVNLDSKALKPQEGVQLRFRGTIQTDGVDVTVFKKRFDRQTRYTARLPVKYEATSYITNVTRRNHQGVSGRCVAVDPGRRGMLYFVHENSTPEQLVKFRYTKQQQDKTWKTKKYRRILQALEAQDPDIVRAESEQSAVLSRFYGHTITNHDNGYPLFRKIRLSAYFNRQRADQKLIQDLRARFGEDAVFVMGNWSAPHARYHEPIRGLGFRRLLKKHEFQVYLIDEYRTSRCCPTCLNESLHTFRRVPNPRPYQRERILLLSAMAF

SEQ ID NO: 4681 - protein, 293 aa, Rhizopus microsporus
MWHIRSYNPIFVALQEVDNSDNPFFHFDLLHQQSVRHQSLWAQYYGLVCFDPSFSITRIPIPEGILCLLAQVTHINDFIEPFFILAIYAPQRVKFRYIKQQQDKTWKTKKYRRILQDLKAHEPDVMQAEQALSQQPSSTVSIERFCRIILPLLTNLRVRLLHYYTVYSHSTFSITFDHVLQARSKYSAVLSKFYGHTITNHDNGYFLFRKVRLSAYFNKQRADQKLIQDLRAKFGEDAVFVMGNWFAPHARYHEPIRGFGFRRLLKKHGFQIYLVDEYKTSRAIVLSKAPDSS

SEQ ID NO: 4682 - protein, 536 aa, Rhizopus microsporus
MKAQLFVNYFILKHPNKLTNDFFEQNFWYTISKIVRAGPDKIKSILEDYRNRRKERSDEENLDVDQLTNAFVFLSSTTTNGSLFVEENGLKNYGQSLSAACETVALSYNNYYIENFENIICNYFIYILKRKYPNVRVGCLKNLVYNHVYDEVLVRCEPSSIPDEMLGRFDSDVASSLSSFLNPLILEMKSRMPMLPVSKVSLNNGPFKILPALRHILEKYENLHMAQPSPIDKDNASKLVPPRLFSIFPEAKQEKQINESPFDHNQRQFFQMFDFKKLGFRSWEELKNMPEQRGRMFLNGMYTDDYTCSVLFCRKVLLSSVADGVSLELSDFTTDEVDTYFRPCTVGPGRKDAFVSYHGGTDIRRLSSAEYYSMSGTVSRQKVQQGRKQNLGIESIKTNIPSPKTASTQRYMLYITYILQHMDSLFNFYNFETTKLKWLNYIGSQEVIQESNKTHFEEGDRKKMPLVIFGDGLKNKGHIKFNGLRRGVSNKIYRQLKRREGLGELLLLDINEFKTSKVNLQLLLKPRPSESKMWRR

SEQ ID NO: 4683 - protein, 445 aa, Rhizopus microsporus
MSRIPIYPEVEKFIALKRRIKIENTQSNDNSDDLPAQNSRRTGTKRKDTSDTIKAKKGVKRRRQAATSEAPSSTKMKNRMPTLPVSKVSLNNGPFKILPVLRHILEQYENLHMAQPSPIDKDNASKFVPPRLFSLFPNPGLGWRFIKVDAQNLTGILPEAKQEKQINESPFDHNQRQFFQMFDFKKLGFRSWEELKNMPEQRGRMFLNGMYTDDYTCSVLFCRKVLLSSVAYGVSLELSDFTTDEVDKYFRPCTVDPGRKDAFVSYHGGTDIRRLSSAEYYSMSGTVNRQKAQQGRKQSLGIESIETNIPSPKTASTQRYMLYITYILQHMDSLFNFYNFETTKLKWLNYIGSQEVIQESNKTRFEEGDRKKKPLVIFDDGLKNKGHIKFKGLRRGVSNKIYRQLKRREGLGELLLLDINEFKTSKANLQLLLKPRPSESKMWRR

SEQ ID NO: 4684 - protein, 1189 aa, Rhizopus microsporus
MVNAWELIQKKTFTKWVNNKLDVKNIPNIVHLNEDLANGVRLIQLLEIIGGESLRPYNQHPTMIFQKMENVNKALDFIKSRGVALTNIGAEDIVNKNLKLVLGMLWTIILRFTIADINQDGKNAKEGLLLWCQRKTASYEEVDVQDFTYSWTDGLALCALIHHHHPELIDWDALDKTDRHGNTALAFEIAEKNFNIPKLLDVEDLCDISKPDERSVMTYVAEYFHAFSALDEFETAGRRVAKFADVLASVWEMKHHYEERVIALMEAVDLMQEEWESTELTDSYTDAKEKSTNFAIYKSTQKRAWLAEKRDIDALLGNIQTKAKTYNLRPYYPPNGLTLKDLDDCWSRLLQNEARYHRRINSTIRQIKEGLRKAFAEAANDFQEQLDTISAKLVNLEGSLQSQLRIVQNLTNLFEPLQESLDIIEMLDQECIEANTEENDYTVYSFEDLRFGLDLVKEAVQKKSAFIQNQIISRNMTNLTPVQLEEFEQTFRYFDKDNTNTLSVSEFKYALSSLGIVYDNDKLENIFYTITNDNDFATFEQFIRFMVSVTEDKSTPDQIRESFRTMAGDKPYVTELDLKMSQIPMKMIDYLKRTMPNSEDNAEGYDYELYIEQIREPKTPKDFADIADDAEIWDVDPGISTIFTAVDSTGHACIRTTNLEEYYHLCGYSLATRRRKEYQECHLDEFKYQKFKLYIKKQKEAQEIVKSLFDRSNPNKIKHVPLPPDDLPSSFQQKRIIAFGNGSFSSSMKGKRAATTRRITEEIKRKCKQSEFVSVDGYLTSQICNKCKANQLNNTSIAGSKRRVHSVLKCESCGTVWNHDVNSALNVYGIFVYKSKHDNESPLSFKRPTLFPGFNALSITAVHSLTPRYISFCFIKLNFNLRKLKLGKTYYNPPTLFRAPVSVRKMVKILQDPAIFASVAAITVVGSLGTWFYYFRKRPTRVLDQHTTKEFKLQAITPTSHNTSIYRFSLPRQNDVLGLPIGQHIVLTANINGKEVSRSYTPITSDEEKGYFELLIKNYPNGTLTRHISKMKVGDRIGVRGPKGAFIYSPNMVKEIGMVAGGTGITPMLQIIKAILRNPADKTKISLIFGNVTKSDILLEEELQGLVEQHPDRFNVYHVLNEPPENWNQGVGFITKDILEQRLPKPSNDVKILVCGPPPMVKAVTNATTDLGYEPPRTVSKLTDQVFKF

SEQ ID NO: 4685 - protein, 304 aa, Rhizopus microsporus
MFKKTAVVQDETRREPKTPKDFADIVDDAEIWDVDPGISTIFTVVDSTEHERIRTTSLEEYYYLYGYNLATRRRKEHQEYHLDEFKYISELPTLKTANLTSFLLAASTRLHNYQRIHDYYCQGKWYAALLYGTYFNNAVLFDNSKKYDKSSTVGAKNQNPNKIKHVPLPPTDLPYSSQRKRIIAFGNGSFSSSMKGKRAAPTRRITEEIKRKCKQSNGEAKFAYVDEYLTSQICNKCKTNQLNNISIAGSKRRVHSVLKCESCGAVWNRDVNSALNIYGIFAYKSKHGNESPPPLQKTNDVPWI

SEQ ID NO: 4686 - protein, 629 aa, Rhizopus microsporus
MRKKFSDQLRKCCLTGSRYYTVFLLTIEAEDLLEDAVDEDEEEESIDLTSSRGWTAGEVYMDSRLSGSAEGFTFLNSRLMMNNGRCASPLDYFLFFLPVDHFYSIIHNTNFHARSLGHWEDITFHEYLMWIALLTVITVVRHNNRKAYWRQDQSFFLMDIDYSQYMSFNRFNDIMNMYIFEIPSKQAQELDPLYQIRSTIQAFVSSCGATRLTSEKTFKSFDGNLVTIKWPEVVDEYERHKSRVFSEEGASRGHSSFKDNLAFNVLEHSVDHGFPSLFSQTQTNLFKNTSFEASDDDFQETPLLRKGKNVHTILKAAKEGTSAPGPSDVVINENASMPVVNKDTSAQAVSPAPIPYTSCTSAPTKASKKYQSKVDKTEVLKKEKEKNKVTGNEQKQSKTKPPKPKDTVEKTFVIKTSLANTCRYPKFVTLEEYYNLCGYNLATRRRKEHQEYHLDEFNCPYTSTKLSKNSQLLLSRSQKLKFKTYINKQKGTQEIVKRLFDNSKNKHVPLPPADLPSFSQRKRNIAFGIDSFFSSMKGKRPAPINEGTEFVSVDEYLTSQICNKCKPRQLNNTSIAGSKRRVHSILKCESCGTVWNRDVNSVLNIYGIFVYKSKHDNENPPPSKRPSKD

SEQ ID NO: 4687 - protein, 381 aa, Rhizopus microsporus
MKRRKDDDPPPPKAKCNKEKAVDHGFPSLFSQTQTNLFKNTSFEASDDDFQETPLLRKGKNVHTILKAAKEGTSAPGPSDVVINENASMPVVNKDTSAQAVSPAPIPYTSCTSAPTKASKKYQSKVDKTEVLKKEKEKNKVTGNEQKQSKTKPPKPKDTVEKTFVIKTSLANTCRYPKFVTLEEYYNLCGYNLATRRRKEHQEYHLDEFNCPYTSTKLSKNSQLLLSRSQKLKFKTYINKQKGTQEIVKRLFDNSKNKHVPLPPADLPSFSQRKRNIAFGIDSFFSSMKGKRPAPINEGTEFVSVDEYLTSQICNKCKPRQLNNTSIAGSKRRVHSILKCESCGTVWNRDVNSVLNIYGIFVYKSKHDNENPPPSKRPSKD

SEQ ID NO: 4688 - protein, 237 aa, Rhizopus microsporus
MLPSSVTDHVSLELSNFTSDEVDKYFRSCTVGPGRKGAFVLYHGGTDVRRLSSAEYYGMGGAVKRQNLQQDYRKAKMAKFYWAPNGHSRKRKSAVVQEELTRTSYPTIRKRKNKNRFKDLRQSVSNKIYRQLKHREGLRELLLFDTNEYKTSKACNFCSNQRLQNLKREEGDDSKKIHQVLKCNTCNIFWNRDVMAFRNILLIARSTWNGQDRSNVFKRQLVTSNVIASSHSGGALT

SEQ ID NO: 4689 - protein, 384 aa, Rhizopus microsporus
MNFQVFYEDRHGNVVDKYGRSKSMDYIIDEEQYALETVGSYAQYLHSQPQEDSSDVDSMEDEDAKDDIDVCMKEASSKRAYALYTDQGKVRFFKLVFEKVMSASAAAKQLDIHHKKTGRSCILHEEHKQVILKYIDENPSAVLEQVMERLLQKFQDLKVSKSTVYNFSAFHINLKRSMVWSKKGLPAVATVPKTRAQTTTILGAISASELIKSYSRLTRQVWRRYRVCDGNWSAPHARYHKHIHGLGFRRHLKKHGFQIFFIDEYKASRCCPTRLNESLHTFRRIPNPRPYQREQHSTVVCHGLLRCTNLYYRPVMTASDGYRLWNRDVAACLICMHILRGFRRNSMVSHRFRRAAVAPARCRRRVDDQEQSRTRVRLNDDSPS

SEQ ID NO: 4690 - protein, 371 aa, Rhizopus microsporus
MIHANYFGIQDVTEETLKKHSFQTALRQALNEDGRKSESTDPVVMKLALNRYISNFKNMWFQKMRSRKILNRVLIVLLRVHLAPKRERSLFILSLLDLRIDDEVIIDIAADTNPTAAEIPGFKLPQKKQRSSSLQSLAKYTRPTLPKVISEIEAKLSVYSFQEIHSIEELNKWYDGRITHQDVLRDYYYSQQKVRQLRAYELQKRKYINRLCSQERSYVTSSSKKPLTMFIGDSGLCFGSSIKGYQRYGGYWKPIKHSLYTMACITSEYNTSQTCIFCFKKLLHPKCSTTDKNDRINLKNVNGAFVCVNPSYPSVKAGQNTHARDTLSAVAIGLSGIATLLLGTTFPQFNQPAAAFCTGNAVRPITTGYNT

SEQ ID NO: 4691 - protein, 422 aa, Rhizopus microsporus
MSFQIFYEDGHDNVVGEYGRPEPMEYIIDEERYTLETVRLHTQYLHNKPQENNFDVSSMVDEDAKDDPDVCMKEASSKRAYTLYTDQGKVRFFKLMFKKVMSASAAAKQLGIHHKKTGRSRILQEHKQVILEYIDENPLAALEQKRFDRQTRYTARFTVEYEATSYITNLTRRSHQKISGRCIAVGPGKRDMLYPQGKPWKTKKYRRILQDLKVQNPDVAQAEQTLSQQPSSTVSVEDSGRFLQARPEQFAALSRFYGHTITNHDNGYPLFRKIRLSAYVNKQRADQKLTQGLHAKFGEDTVFVMGNWSAPHTRYHEPIRGLDEYKTSRCCPTCHNESLHTFRRVPNPRPYQRERYSTVVCHGLLRCTNLYCKLAMAAPDRYHLWNRDVAACLNYMHILRRLRRNDMVPHKLRRVAVAPARR

SEQ ID NO: 4692 - protein, 494 aa, Rhizopus microsporus
MSFQIVYEDGHSNAVDAYGRPEPMDYIIDEERYALKTVSLHAQYLHNQPQENNFVVTPMTDENAKDDPDVRMNGASSKRVYKLYTDQDKVRFFKLMLEKVMSVSAAAQQLGIHVRAAQRWAQMYKTDPNSIFIKHKKTGRSRILQEEHKRVILEYIDEDPSVVMEQVIERLLQKFQDLKVSKSTVYNFVHKWECTDMNFRTNRIFLDESAFHINLKRSMAWPKKGLPAVVTVPKTRSQTTTILGAISASGLIKCSLRLPQPSAKKRKREAEQALSQQPSSTVSVEDFGRFLQARSEQSAVLSRFYGHTITNHDNGYPLFRKVRLSAYFNSQCADQKLIQDLRAKFGEDAVFVMGNWSAPHARYHEPIRGLGFRRLLKKHGFQVYLIDYLRTFRRVPNPRPYQRERYPTVACHGLLRCTNLYCRPAMAAPDRYRLWNRDVAACLNYVHILRGLRRNGMVPHRFRRVAVAPTRRRRRVDNQEQPRTRIRLDDDSPS

SEQ ID NO: 4693 - protein, 407 aa, Rhizopus microsporus
MYKKNRGVRRALVIEAILAELPLHQSIRKPVACVLQEEHKQVILEYIDENPSVALEQVMKRLLQKFQDLKISKSTVYNFVRTEYNLSLKKAQFQPVDRSSEEKIQERFDWVHKWKCTDMDFRTNRVLLDESPEITADASQEKKEGYVELTSTGAATGHYSSFLKVTMDEMDQCPHIKWYYLVMDSAPSSTVPVEGFDHFLQARSEQFAVISVFYRHTITNHDNGYPLFRKAHLRAKFGEDAVFVMGSWSDLHARYHEPIRGHGFRRLLKKHGLQVYLIDEYKTSRYCPTCHNESLHTFRRVPNPRPYQRERYPTVVYHGLLRCTNLYCRPAMAAPDRYRLWNRDVAACLNYMHILRGLRRNVMVPHRFHRVTVAPIRRRRRVDDQEQPRTRIRLDDDSPSQLSLGHI

SEQ ID NO: 4694 - protein, 259 aa, Rhizopus microsporus
MDFRTNCVFLDESAFHINLKRSMAWSKKGLHAAVTVPKTRAQTTTILGAISASELIKYSLRLPQPSAKKRKREGYVELTSTGTVTGHYFSFLKAMMDEIDQYPHMKCLFYGHTIKNHDNGYPPFRKVRLSAYFNKQRADQKLIQDLRAKFREDAVFMMGNWSAPHARYHESIRGLGFRRLLKKHGFQVYLIDECTNLYCRPAMAAPDRYRFWNRDVAAGLNYMHILREIRHNGMVPHRFRRVAVAPTRRRRRVDHNSLS

SEQ ID NO: 4695 - protein, 452 aa, Rhizopus microsporus
MHRQVIQPQENNFDVGSMADEDAKDDIDVCMKEASSKREYTLYTDQDNARFFKLTFVKVMSASAAAKQLGIHVYTAQRWAQMYKTDPHSIFIKYKKTGRSCILHEEHKQVILEYIGENPSATLEQVMERLLQKLQNLRSLKTLSTIFMAWSKKGLPAVVTVPKTRAQTTTILGAISASGLIKYSLRLPQPPAKKRKREGYVELTSTGTDSDVVQAEQALSQQPSSAVSVERFGRFLQARSEQSAVLGHFYGHTTTNHDDGYPLFRKIRLSAYVNKQRADQKLIQDLRAKFGEGAVLVMGNWFAPHVRYHEPIRDLDFRRLLKKRGFQVFLIDEYKASRCCPACHSESRHMFRRVPNPQPYQRERYSTVVCHGFLRCTNLYCRPAMTTPDRYRLWNRDVAACLNYLHILRGLRLNGMVPHRFHGVTVAPTRRRRRADGQEQPRTRRRTDDSPS

SEQ ID NO: 4696 - protein, 1045 aa, Rhizopus microsporus
MHNYISTVILNKIRHSKKLEADLLKAKNDLSNKTRLPPGIMTNAASFADLETNVMRNFMENNGQKLMIELWKDYVNEHFDSIAKTLRDRNLSFKKEEPSSSLIQSGSSGINVEEQYRTFSISVNKALRKELPENIENVVKTKIETSLENSSDFCAQFLFIINAMSIVIKSDGKIIPKKSTEFDMLQVLPFEFVQKNGVQPVLSSLPLPHNMPDEYRRELEVLFTEQHLSLIQSHFFGSGAQQKNLEKHPVEDFLFKELASNGITKDSYNTMLTTEEMKVALARIVTNIKNMWSTNDIFKKLLDRLLDVLLRLHLAGARTSKYNSYVARKAKNKYTVDDSFLSSNSQRNLISTEYKKKRKREQKLQMITDKEKQAKHSVASSSTDKVEHDEESNSDNANTDEPSRSRLKGLKSVTKHLLLSSGETITVEDIKRDMTDATEKEISTMSLLIQKLKPYIPAKQNRFVIGYQIPFCLLANDILHVTGNKKFTRLLFPQPRPSQLQALKINATSIYQMLTSEPNPLSIADFDNNKIDSIEYARSNKDAVFCSIFDMAQIKKTCESYNLTFAQNIKILPAGVVAAEKPIDHLSRILNYPAVINESKKNPSDLQCEIDTLQHNVNNLKDSLRTLLKSDLVTKLTAEIKTIKVELMSEHKDGVITKLNATKKKRRDAYLAIQKCRSSKSALNQELYYKRMAMRYKSQIAKKEEVTSTSSTKEEKEDSFFKLTNETRGVYEVTKCRLVESPEDFVFSGTDNGIINMSTTTAFNFDRYKFHLKLYNRYQILKETNIDLQVNKDYLNLPPQQKKLERAKKYTTDGKEISKVEVILSEAPITTTNSYISEYQASFNLHVGYSGQLRRFYSSKKRVNLQRAEEIQKSRFLNSIIDKERREIVSKRDWDKLVQFIGDRGTGVGTRIKGHRRYGGRWLEIMRGKRGNVCITSEYKTSQTCVYCFEQLEHPQFIEQKNGKMIKKLTKGSLMCINTECVSVKHGRSTKSRDALSSLAIGLSGLISCVLGVPIPHFSPNQISQYNTENFETQASALLEEEKNS

SEQ ID NO: 4697 - protein, 391 aa, Rhizopus microsporus
MAQPSQIDKDSASKPVPPRLFSLFPNPGLGWRFIKVDAQNLTGIFPEAKHEKQINESPFDHNQRQFFHMFDFKKLGFRSWEELKNIPEQRGRMLLNGMYTDGYTCRLLFCRKVLPASAADDVSLELNDFTTDEIEEYFRPCTVGPGRKDAFVSYHGGTDVRRLSSAEYYGIESIETNMPASKTASIQRHMTYLNYILRHVDILLNFYNFETAKLKWLNYVGSQKVIQESVNILLNGGKKKKARRSAVANEEHPLPIPRSESRKNKNRFEEGDCLRHGVSNRIYRQLKHREGLGELLLLDINKFKTSKTCNSCLSQELQNLKCGEGDNVKKIHQVLKCNTCNIFWNCDVMAAKNMLLIAHCVWNGQDRPNVFKRQFTTSNVAASFHSGGALA

SEQ ID NO: 4698 - protein, 633 aa, Rhizopus microsporus
MNRKKGDDPPPPKAKLNKGRAVDCGFPSLFAQTQTHLFKNTAFGANDDDFQETSLLGKDKNIRTTSKVSTKDISTLGSSNAVTSEKISMTAVNKDTSAEAVLPAPIPSISCTFTPIKTSKKYKDKADKTEALKKRKEGIRRQIMSKNKYPKFVTLIQEVVDHITQPVYDGPIFANHYFLKLLKNGEGLPVITQNLFYNIFSIFAGQGKHTSDSIKSFKAFCESTSLTPSELDKYANKRYVIIISSMTKQYETLVRNYVCSTYENRAIRHILNVLSEKASYFCGNSLTVKQRKSLAKRVFQQKINLKSAWPSIVSRVERHEAIVNNFLTFWSTYNASNDADVSSEADLYAKPQCYMKWLHFIQKKLQELPFTLEKTSKLRNIDKKDIDAVQAFIKTVQARIQDKTFMPFKYIDPRGLRYFSLLPLYKIDSQSFWKLAKQRDNKIKPGQKNDNDLKLWYFNVFDFSKISYKTLESLTLRPKKSAIWNVDPDILTIFTAADSTEHEHIRTTSLEEYYHLCGYNLAIRRRKEHQKCHLDEFKSQKLKFKTYINKQKGTQEIVKRLFDNSKKYGTSSTVGAKSQILVKSKHIPLPPADLPSSSQRKRIIAFENGSFGSSMKGKRAAPIRRITEEIKRK

SEQ ID NO: 4699 - protein, 426 aa, Rhizopus microsporus
MSFQIFYEGVHSNAVDEYGRPEPMDYIIDEERYALETVSSHTQHLHNKPQENNIDVGSMADEDAKDDPDVCMKEASSKRAYTLYTDQDKHKKTGRSRILHEEHKQVILEYIDENPSAVLEQVMERLLQKLQDLKVSKSTVYNFVRTESLEPQEDGQLRFRSTIQTDSVGVTIFKKRLDRQTRYTARFTVEYEATSYITNLTGRNYQEISGRCVAVDPGRRDVLYFVRENSTPEQPVQFQYTKQQQDKTWKTKKYRRILQGFKAQDPDVVQAEQALSQQPSSTISLIQDLRAKFGEDAMFVMGNWPAPHARYHEPIRGLDEYKTSRCCPTCRNESLRTFRRVPNPRPYQRERYSTVVCHGLLRCTNLYCRSAMAAPDRYRLWNKDVAACFNYMYTLRGLRRNGMVPHRFHRAAVVPTRRRRRVDDQE

SEQ ID NO: 4700 - protein, 401 aa, Rhizopus microsporus
MADDPDVCMKEALSKRAYTLYTDQDKVRFFKLMFEKVMSASAAAKQLDIHVHTAQRWAQMYKTDPDSYVDENPSAVLEQVMERLLQNFQDLKVSKSTVYNFVRTEYNLSLKKAQFQPVDRNSEEKIQECFDWVRKWGRTDMDFRTNCVFLDESAFHINLKRSMACFLKAMMDEMDQCPHMKGYYLAMDSTSAVLSRFYGYTTTNHDNGYPLFRKLPLSAYFNEQRADQKLIQDLHTKFGEDAVFVIGSWSVPHARYHEPIRGLGFRRLLKKHRFQVYLIDKYKASRCCPTCHNESLHTFRRVPNPRLYQRERYPTVVCHGLLRCTNLYCRPDMAAPDRYRLWNKDVTAYLNYVHILRGLRRNGMVPHRFRRVAVAPTRCRRRVDDQEQPRTRIRLDDDSPS

SEQ ID NO: 4701 - protein, 249 aa, Rhizopus microsporus
MARLFSLFPVPSLKWRSVSINPNMLSSFAGKPKQSNYEDKFNMFHTVFDLSSLGVNRSDGFAADVVLYKGVNNNEDKSLDSGILQLHWVHSSPKKRTEKNGEGRNEKRIAGHPFDQDYIFDAISYVTYIMANIQKILDFYGYETAEGRFHCYQGGRRAREEMVNILINGGPKSSGGHKKFICNSCENMAFTSAFINFHGIQSCAGCGLLWQRDINGSKNIFKIANGIFRECGRPQAFCRRIEHGSPSGV

SEQ ID NO: 4702 - protein, 507 aa, Rhizopus microsporus
MDYIIDEERYALETVSSHTQYLHDQPQENNFDVGSVADENAKDDPDACMKEASSKRVYTLYTDKGKVIFFKLMFENVMNALAAAKQLGIHVHTAQRWAQMYKTYTDSIFIKHKITGRSRILHEEYKQVILEYIDESPSAALEQVMEPLLQKFQDLKVSKSTIYNFVRTEFVNLDSKALKPQEGGQLRFRGTIQTDGVGVTVLKKGFDRQTRYTARLTVEYKATSYITNLTRRNHQEISGRSVAVGPGRRDMLYFVYEKSTSEQPVKFRYTKQQPDKTWKTKKYRRILQDIKAQDHDVVQAEQALSQQPSSAVSVERFGRFLQARSEQSAVLSRFYGHTITNHDNGYPLFRKSKYHSADQKLIQDLRAKFREDAVLVMENWSAPMLVTMNLSVALYKTSRYCPACHNGSLHTFRRVPNPRLYQRERYSTVVCHGLLRSAMAAPDRYRLWNRDVAACLNYIHILRGLRRNGMVPHRFRRVAVAPTRRRRRVDDQEQPRTRIRLDDDSPS

SEQ ID NO: 4703 - protein, 378 aa, Rhizopus microsporus
MYKTDPDSIFIKHQKTGRSRILHEEHKISRPVKVLSTILDNEEKIQERFDWVRKWECTSMDFRTNCVFLNEPAFHINLKRSIARSKKGLLAVVTAPKARAQTTTILGTTSALGLIKYSLRLPQSSAKRRKREGYVELTSQDPAVVQAEQALSHQPSSTVSVEDFGRFLQARSEQSAVLSRFYGHTITNHDNGYPLFRKIRISAYFNKQRADQKLIQDLRAKFGEDAVFMMGNWFTPHARYHEHIRCLGFRKLFKKHGFQVFLIDGYKTSRCCPTCHNESLQMLRRIPNPRPYQHERYPAVVCHGHLRCTNLYCRSAMAAPDRYRLWNRDVAACLNYMHILRGLRRNGMVPHRFRRVAVAPTRRRRRVDDQEQPRTRIR

SEQ ID NO: 4704 - protein, 446 aa, Rhizopus microsporus
MSFQIFYKDGHGNAVDEYGRPEPMDYIIDEVRYALETVSSYAQYLHNQLQKNNFVVASMADEDADVYMKEAPIKRAYTLYTDQFRFFKLMLEKVMSASAAAKQIAVLEQVMERLLQKLQDLKVSKSTVYNFVRTECNLSFKKAQFQSVDRNSEEKIQERFDWVLWPGQKKGLPAVVTVPKTRAQTTTILGAISASGLIKSQNPDVVQAEQALSQHPSSTMFVEDFDRFLQARSEHSAVLSRFYGHIITNHDNGYPFFRKIRLSAYFNKQRADQKLIQDLRAKFGEDAVFVMGNWSSPYASYYEPIRSLGFRGFFKKHRLQVFLIDEYKTSKCCPTCHNESLHTFRRVPNPRPYQCERYPAVVCHSLLRCTDLYCRPTMAAPDRYRLWNRDVAACLNYEHILRRLRCNGMVPHMLRRAAAAPTRRWRRANDQEQPRTRIRLDDVSPS

SEQ ID NO: 4705 - protein, 345 aa, Rhizopus microsporus
MLFTEGIGVSVLKQNDDTKKGGSGAGRRTKAVDEEDFKYVEKLEKEELLAGVDKCVLIDPDRHDMLYCMHGESTIESKKTYRYTSNQRAIETKSRKFKKFEESLKLDDIRAAEISLSKYKSSTVNGDKFAKHLQERATVTPVLSEYYANEYISAVETNLLPFRKMKLSSFINGQQADRQLARNLIIKFDDNATLIIGNWSAGNVKFHEPIRGVGMRRMLAKQGSKICLLDECKASSLCPSCLNDELEKFNIQDLSREKSNQLCKNQQCLEAMAGTTSRHHLWNRDMVATLNFRHILFGLRENGKRPERLCRLNASPSAGFKRKATSSASSRPTKKITNPLKLPLH

SEQ ID NO: 4706 - protein, 447 aa, Rhizopus microsporus
MDDDEVKHRIRQDIFLPAQTFKQAISQQPIDMEQILQEPIYMEALNTLRPVFDAYDRGYNFGEQGLYYDVKRNPVNHFKAIYQLSRLFVHLGLSVFNCFPLRRSWSPCYVTIDSKILCQNILGIRWSNAVDKLDYWRRVVNLDSKALKPQEGRQLRFRGTIQTDGVGVTVLKKRFDRQKRYTARFTVEYKATSYITNLTRRNHQEISGRCVAVDPGRRDMLYFVHENSTPEQPVKFRYTKQQQDKTWKTKKYRRILQDLKAQDPDVVQAEQALSQQPSSTVSVEDFGRFLQARSEQSAVLSRFYGHTITNHDNGYPLFRKIRLSAYFNRQRADQKLIQDLRAKYREHIRGLGFRRLLKKHGFQVYLIDECTNLYCRPAMTAPDRYRLWNKDVAACLNYMHILRKLRRNGMVPHGFRRVAVAPTRCRRRVDDQEQPRTRIRLDDDSPS

SEQ ID NO: 4707 - protein, 200 aa, Rhizopus microsporus
MSLKEVQGISDNTRFLEIQSKKYRQKICSSEKRFVRKQRDAATKAKPIMFIGNRGIGVGSRIKRYQRYGGDWKQKLHEQETQVCITNENMTSQTCVYCFSKLDHPIHKRMIKGKEITVTSKGPFICRNPKCVLVTKRQPVKSRDTLSALTVGLLGLSYILFHRTFPCCETSLSQSSTEFTNITSSFLNARERLGSDDVTN

SEQ ID NO: 4708 - protein, 514 aa, Rhizopus microsporus
MSFQIFYEDGHGNAVDEYGRPEPMDYNIDEERYALETVSSHTQYLHNQPQENNFDVGSVADEDAKDDPDVCMKESSSKRAYTLYTDQDKARFFKLVFEKAMGASAAAKQLGIHVRVAQRWAQLYKTDPDSIFIKHKKTGRSRILHEEHKQVILQCVDENLSVALEQVMEQLLQKFQDPKVSKSSVNNFVRTECNLLLKKAQFQSVDRNSEAKIQERFDWIHRWECTDMDFRTNCVFLDESAFHINLKRSMAWSKKGLPAVVTVPKTRTQTTTILGAISASGLIKCSLRLPQPSAKKRKREGYVELTTQNPDVVQAEQALSQQPSSTISVEYFGYFLQARSKQFAVLSRFYGHTITNHDNGYFLFRKIRLSVYFNKQWADQKLIQGLRAKYHKPIRGLGFRRLLKKHGFQVYLIDEYKTSRCCPACHSESRHTFCRVPNPRPYQHERYPTVICHSLLRDVAVCLNYMHILHGLRRNGMVPYRFRRVAVAPTRRRRRVDDQEQPRTRIRLDDDYPS

SEQ ID NO: 4709 - protein, 1063 aa, Sipha flava
MHEYAQDAMSYVRHYSRPDLFVTFTYNPQWSEIKRELLHSQTLVDRHDVSARVFKQKLKSLMNFLIKHIVYGQVRYWMYSVEWQKRAKFLDETVDPKLHTVVTKHMIHGPCGVLNYNSPCMVDGKCSKRYPRALISETITGNDGYPLYRRRSVANNGRSVVVKALNNIHRLTDEISTALENKEYCSGLFLDIAQTFDKVWNDGLLYKLKLFMPAPYYLIIKSYLQNRSFVVRQGNDISSTHPIYARVPQGSNLSPDLYNVFAADIPQSSNTLLATYADDIAILSSSPNPILASAELQDHANKIEEWAKKWKIKINTEKPDAQMGLKVSGLRRTVFSRTSNHQQFGNHGVARNFWSASGLPGICGSGEKLVATGHLRYNAKALYELLRATKPLEFKSTHENFRVAAPMYWWCYFDSSKRHFGRLDPLTNAIAAHRNRTKFAMALTTNRAYFCVSMERFTRDSIGVEPKCKRSKKKQVETNDLDFSRFSGFLGLDPGMVNYVGTCYLGVAGASDLKRNYTLKTVKFKQFVCKERAIHRRREKLIGRHEPQLLEYRKIFKNTSSKCCESYGATLAFTAYCLRHHESLHLAFDSPAAFGHVENQRARTGLFWRRFTTGRRELQREPEASRVLVASGFSQPWRDRCATVDSGEYMTTQCCSRCTERMALPPKHEDTSLIASGDDKRRRRHDHRFQFCRKCGITWNWDVSAARNTALVALGLSGDLLFLSFLTIDRTSPEEVGEAGSTMGRGDVMNLSTSSMAIWSSLLLLEIPLTFHRKMIRVENLMVVIGFNEFVYNCXVKARRKKKQPKDFHVIKSARLRNFVKEFGEDIFSCDNAVLFCKVCGVKVSAEKKYNIQQHIARGKHIQQLNIRNQQEKPKSQLLVTGMSMKSSFNEELCNVFLSANIPLTKLNIPTFRDFLHKHTKQIIPDESTLRKNYINQCYTNTIIKIRDYARNKNVWVSIDETTDVEGRYVANVIIGTLEVDNPGKIFLLNSEVLEKANHSTISKLFDRSLFILWPKDILHDNVLLFVSDAAPFMVKSGKSLKVLYSKMVHITCLAQGLHRVAE

SEQ ID NO: 4710 - protein, 267 aa, Sipha flava
MAYELLRAEKPLGFKTTHEDFRAAAPTHWWRYFDFSKRRYGRLDPLTNAIAVHRDRTKFTMSFTTNGAYCCVSMERFTRDSIRVEPKRKRSKKEQVETNDLDLSRFSGFLGIDPGWSTTWTLAISNAEDSLVQRLLDMTETKELVLVCFGDGSLRDSVSYSANRKPAVCSLRRAFHRRRNRRCLSDEYMTTQCCSRYTERMALPLKHEDTSPIASRDDKQRRRHDHGFQFCRKCGITWNRDVNVARNIALVALGLQTGGLQKTICQK

SEQ ID NO: 4711 - protein, 229 aa, Naegleria lovaniensis
MYFGHVQEIPFMSLISTTTRDXXXXHSGQVVALDPGVRTFQTTFDLNGYSTKWGSGGAERIGRLCCAYDKLQSKWSQPEVRHCKRYKYKRAGRRIQQKIRNIVDDLHKKLCLWLCRNYQVILLPSFETQKMVKKLHRRINSKTARKMLTWSHYRFKQRLLHKAREHPWTHIYIVNEAYTSKTCSCCGHIYTVGSSEVFRCPSCGSIFDRDINGARNILLRFLTTHRISF

SEQ ID NO: 4712 - protein, 477 aa, Naegleria lovaniensis
MSSSSSIRNYLSSRTAARAQAIIQHIMPLILENVRKEDGTLSTESPSLYDISEKLQLIFPPHNYQEEEIFTSPKKLLPTAFSKFEFDLFLKTLVDAINNGKIDHSNLTVMDLCGKVYDINNNILMIALPKLSFLKEINLSNVQLNDDIIVGICTKIPQIERVKLENTAITDNGCIGMIKSLPSPQNVKHLNLSKTKVTENSMKYLADLYSALENHLEKLEIEGIDVSRWTVTRLFNNCRKLCKIEKGHEGSFVIFRNNVILLVPSNPNAHSYTLRLDHPLLDERILQQKPQFITNSTCQYNHQQSVPRIGRLCCAYDKLQSKWSQPEVRHCKRYKYKRAGRRIQQKIRNIVDDLHKKLCLWLCRNYQVILLPSFETQKMVKKLHRRINSKTARKMLTWSHYRFKQRLLHKAREHPWTHIYIVNEAYTSKTCSCCGHIHTVGSSEVFRCPSCGSIFDRDINGARNILLRFLTTHRVSF

SEQ ID NO: 4713 - protein, 430 aa, Naegleria lovaniensis
MLLIAFSSKIRITELMSDGVNFISYNNKGCTDRWFNFSQFTVIESKPVFDVPLNVHHSITENVAFDNSKKPPQLKKAKKNQKVAQKFQADKSLKIRLYPNEQERTTLNQWMGTARWIYNRCLEFTNKSKGVKKNKKNFRTFVVNNDNYQTENQWVVNTPYDVRDAAAIELLFNINFEKKKAGTIDKFMIHFRRKKDRKDHFILHCKHWKSKKGQYSFIRNIKSAEPLPKELQYNSVIIKNKLNHYYLCIPQVLDIRGGAERIGRLCCAYDKLQSKWSQLEVRHCKRYKYKRAGRRIQQKIRNIVDDLHKKLCLWLCRNYQVILLPSFETQKMVKKLHRRINSKTARKMLTWSHYRFKQRLLHKAREHPWTHIYIVNEAYTSKTCSCCGHVYTVGSSEVFRCPSCGSIFDRDINAARNILLRFLTTHRISF

SEQ ID NO: 4714 - protein, 555 aa, Ostrinia furnacalis
MSKYVSISVAAKTLGVSIQTLRRWDEEGTLVADRTPKNHRRYDLSKITPEQIHKPDSQLQRKTIAYARVSSHDQKEDLIRQQQVLEMYCANQGWTFELISDLGSGMNYRKKGLNKLLEAIMNDEIGRLVLTHKDRLLRFGAELVFALCEAKSVEIVILNKGENLSFEEELAQDVLEIITVFSARLYGSRTSHFAQASGVARLSYNWALKEWQRQYKADKEYRDQCDYYGVQVDKKLLNKPSEAKIRRHLNSFKREKYPFMLKVTKCAPQLAIKQLGSSFDRFFNGQSKYPKPRKKGVDDRFSLSNDQFSIKDRKISIPNLGWVKMTEDLRYQGKILSAKIFKQGGKWFASIAVELNQPEKLHPKTGLSVGVDLGVSSLATLSNGEVVPSSAPLKKQLAKLRRLAKSFSRKKKGSQNREKAKTKLSRLHYKISCLRKNNLHQVTSDLVKRFDLIAIEDLNVKGMVQNRKLSRAISDMGFYEFKRQLIYKAKQHGKSILSVGRFFPSSKMCSNCGELNQNLTLAMREWRCSCNTLHHRDINAAINILKHADKELVAT

SEQ ID NO: 4715 - protein, 434 aa, Ostrinia furnacalis
MKINKAYKFRLEPNAEQELVLNKLLGSARFVWNQILALSFEMLAKNERINKVNLVNKIPELRKKPECTFLENSSNGVSLQQKVRDLGDAWAKFFDKKEQAKLKQKPFKAKKPKFFKLADGSEVQLRPLMPRFKKKSDGYDSIRIVQFGRYCWVKGNQVKLPNDIGVVKFRKSQDILGEIKNVTISKHVGKWYISFCVESTVEPPIHSSKSAIGVDLGIKKLVTTSTGQVFDPINSFKANQVKLARLQRKLKKKNKFSENWKKLNLKINKLHHHIANIRHDYLHKVTTTLSKNHAMIVVEDLKVANMSKSAKGSIEKKGKNVKAKSGLNKSILDQGWSMLVDMLEYKQQWRGGLLVKVDPKYTSQTCSSCGHVAKENRLTQANFSCVSCGFSENADINASRNILAVGHTVLSVEGGCGKGRPAKQKASEIREEVT

SEQ ID NO: 4716 - protein, 331 aa, Ostrinia furnacalis
MKTLKLRIKDKHYKVLDQLASEVNFVWNYVNDLGFKHLKRKGEFLSAYDIAKYTKGTSKECNLHSQTVQAITEELVTRRKQFKKAKLKWRVSNKKSARRSLGWIPFKKVAIKYADGYVQYGKHQFKLWDSYGLSKYNVKTGSFVEDSRGRWYVCLVVDKTKQVKSKGNTSIGIDLGLKDLATCSDGVKLKAPQIYRQYEQKLGIAQRARNKKRVKAIHAKIRNIRQNTLHQFSHKLVNKHAAIFVGNVNAKALARTKLAKSVLDASWTTLRTMLKYKCENASVWYKEVNEAYTTQTCSSCGSRCSSPKGRTGLGIREWQCMECGTFHXSNY

SEQ ID NO: 4717 - protein, 248 aa, Contarinia nasturtii
MTDMYYLANTVLGVVPSSRNPLTNRMNKYTLDYYMYGHRDELWNLVFDMDKIKQIGKQKQFNFQIVTNSVCVSILYEKPAKAWVENSEQATFNNMTYASAIDPNEKTWVAVVRRHIKSNIEKKRDRKADRLTWWFVEEEQMDFKSYPVIPSPRGSTWKSYIQHRIKMLRMGMQAYATRKYARLDVDHHIKATKTSDKVAMRITKNKPSWIWIGVGFMAPNRPWGIKKRKRCPGTRKLAISFKKQEHTK

SEQ ID NO: 4718 - protein, 246 aa, Contarinia nasturtii
MDKIKQIGKQKQFNFQIVTNGVCVSILYEKPAKAWVENSEQATFNNMTYASAIDPNEKTWVAVVRRHINSNIEENIKISNPRFHWQTEQKKRDRKADRLTWWFVEEEQMDFKSYPVIPSPRRSTWKSYIQHRIKMLRMGMQAYATRKYARMDLDHHIKATKTSDKVAMRVTNNKPSWIWIGAGEMAPNRPWGIKKRKRCPGTRKLAISFKKQEHTKEFTSQFRFVEIGVEIGMVGIVDAIIQALHK

SEQ ID NO: 4719 - protein, 462 aa, Contarinia nasturtii
MKVFQMNTNEAIEEKYLPSDIDCVVKLILKEKVIKVPASDPNKLYRCGVLYDIVNKLNVFPEIDLHDLTTNSKNWFKAVPMYLSMQREIEEFNLLRAHQEPPKKRKKRKRRRPKGKKRKWIIKRKQMLDDLEYLPCIRNLVVVPIDGIAVSLQYSTKKKETSNTQSGTSRLDIIDMLKAGKFKRLGAKRFTKNFIEKERQDRENRELYAMMPSPKGSQWLSYIKHRVKMTKHGIEAYSTAKYTRLALDKYIRSNKAIDGFVNKITNKEPTLLFHGADGEVPPDCPIRIKKHVRCPGVRKLMQAYKKRPYIVVVPVDEWGTSQTDARCMCRFQNQPKSAKFKMCRCIPNAITLLPTKIVSKFGKTDTSTYRQLQRTLNGAFEIEEELMSRVKPYYKKWQLDLECTVTWHRDVVAAKNILLKGLWTLLGLPIPAAINRYWNQINADAAVFDDDNDVDISEPEFE

SEQ ID NO: 4720 - protein, 447 aa, Contarinia nasturtii
MLAGEKPVESSKKPLLLVNNKQGSDESDKVQLMQQVSEESNNGNNEKLSEIVPPLPPASMLNTGVSGGSSPSREVQEILSQKGSDCINDFYSNSIDIQDDTDASGNNCDAADGNDEEKNSNQDDDETYTLNNEIQKHLLPVVGARLDGIKAQIQSEIAQKLTITDKVIKENISNICKSKYSTKKKETSNTQSGTSRLDIVDMLKAGKFKRLGGTDSGMRNWNTTTILTKKLALDKYITSNKAIDGFVNKITNKEPTLLFHGADGEVPPDCPIRIKKHVRCPGVRKLMQAYMKRPYIVVVPVDEWGTSQTDARCMCRFQNQPKSAKFKICRCIPNAITLLPTKIVSKFGKTDTSTYRQLQRTLNGAFEIEELMSRVKPYYKKWQLDLECTVTWHRDVVAAKNILLKGLWTLLGLPIPAAINRYWNQINADAAVFDDDNDVDISEPEFE

SEQ ID NO: 4721 - protein, 451 aa, Contarinia nasturtii
MGNAFNELFKQYTTNLKNNIKVWSYSRIRKFFVLKRFELNLVLGNNITEIDVKNATKSVMFNNIMRTSANVNLLLDQAKLIGIPVGEKFHDRVKEHWFQTIPVFIHIQRQIFDHHVRYTLLNEQWRQYWRDRKAKKNPTPPRIARPPYLKNFRVIPLHDFEMKHIRIDFHLFYEFARKLGALKLTKGWFGQPKSISKEMYSDDPATYWDKIFNMPKILKIGGGKAFDYAILTDSVAISLCFVKPERPIIELTNEQINDKFNNNEFKFVLGMDPGVRTWNATVRKHIKSGIEENITIDGPKYHWHAKYGKRKRKIDKLIEEFTKLEQDDRKRYAFYPSAKGRSHWMCYIEHRVKMMQRGMSVYSSRKYLRQRLDKYIEENRASDLIAAWLTLKKACLIFIGAAQMAPNSPIGIKKRLRCPGVRRLVRSFNKLGNCIIRDSDDDYVLEVSDDE

SEQ ID NO: 4722 - protein, 415 aa, Contarinia nasturtii
MANRFKPSIPAKGETKDEITTIKCALKPSKPKSSYKPQGTKPRGPRAELPRIDSEFKAIVEGLDDYHRIDWPNNKDFSNGLKHLTNQYTDNVVTNSTTHPNKHITQYLKLKVFELSTDGEEDAEKFLPSDIESVINFVMSSKQFHWQTCQNVRNAKAKRWTKDFVQEKRRDRENRKIYPVMPSPKGSQWLNYVKHRIKMMKHGICAYSTAKYTRLALDKHIKTSSVVDNWVDKVTDKPPTLFFFGVDGEIPPDSPISIKKHVRCPGVLKTLRRKMYEAIPKPEQSRQIQEMPVHTRRQNLATKKNCVKVEQDGSIGFDSCNEPLLSKVKSYYKNWQLNLECSVTWHCDVVAAKNILLKVLWTLLGFPIPEAINRYLYKAREAVAEATEVAAATAANVDNDVEMFEYDQQPADHAV

SEQ ID NO: 4723 - protein, 715 aa, Contarinia nasturtii
MGRHKKADPNADQRCIKQGLPSIIRERYRDVIVAIISYLSVKATKIACLASLLFLMKAVLVDNIGNISLMLPGFRNIVDAAHIDWPTNGGFGNGFKYIWEQYYDNVKTNLTTHCESRLRKFFKMRAFELNDYAIKYNYFNNLYGMIEFELPYYDEEDIKNAINYTYRRRNTAIGDVEREMRLGELLDELRWLGAPDDCNIRDFVKEDWFKSIRMWSEIQRDIRNFHFAYEDRRDKPQIKNFVVVPMCTFQRRHIRIDTDALYVILSNAKLVPRKCGKRTRKDGTTNFKNITSNEFRTNKILSWNLFFDVEKILKLVHNKKEFDSQICSDGVSVSLMYKKPKVPPVETTDDEIKAMYDSNELKYAVGCDPGMRTWNASVRRDLHTKEEVNLRISSKRYHWDAKQGLRNAKAERITRLFTFEEQADRNRIAAMIGEMPSPKGPSWRSYIEHRLRVMNDGIETYSTKQYARLGLDKHIESVRAIDKTACKMVHNQPSIFYMGASGSTPANSPIKIKKHVRCPGTRKLLAAIMKRGNCIIRMVDEYMTSQHCPLCFKRFPQQTRRDRYKTCVGCVPNPIVGLPRTIVTNVSKRLLQMRRTIERMWREMRDIGDVIAATLRDGPNAGRLVSKKQRFFKTWLPNVANVEIEGAAGAQPTLTTVWHRDIAAAKLIFYKGECVVFKRTIHPNVRRPRRVDNNQPLPLYRGQNQNVNNGHLQPQ

SEQ ID NO: 4724 - protein, 682 aa, Contarinia nasturtii
MDAERERREYILRKNQERDARLDTKRRNERSSISFAFGSSTPRLLDPVEVNLVVPSGAYWNSRRSTSISNVSYGGGTQLSRRSSERELSDGTKKRATSASGLDRPDERQTTIKTIVCRSAIFVNNVSKRYKRCIIENVHIIARNAETKCSISATEKVENVSEPMIHDVETTIETKTVETVTSTTEASSEDNENVHTVQETYEIKTETTSESEPVSNDENVDNNKLTEPENNEMTASMIQRRILSAEEAKAALAERRRLAREEAERQAELERQKQEEERLRQLKLQEEEEEKQRQFELEAQRLVEEQRQAEEKRLQQAIEEARQREEEERLRKGDWEDQDYYNFWNRYANLPKVNRRSQKFDYCITTDGITVCLKMIRHKRQVDESNVPNEVGSNRNERDLSDVIPDDVQAAFDANKIEKIIGNDPGEKVMIATTRLNIAAEEEVSYRLTSKQWHWQVGTVKRKKMMKKFTGKFEAECRRLRENREEYPETPSMKSRDHETYLAYKLRVFEESGQVKYKRRVARLRFDKYVQTQVTAHEICREMTGLQQEIPNREDRKIIYALGNAKLAANSPIKGHLRSPKPAVTKTMNRYVLTMGVKEPGTSMFCSKCRDMTERAKEVARRKGHIENYNKKDRPEIWYRINRKVRRLAQCWVALVNQLHMATHHKVLNNCSNDNGSKAHNF

SEQ ID NO: 4725 - protein, 472 aa, Contarinia nasturtii
MSGRKRKGVGAICGSRPKRRKVGKLPEESGLLAIKVSAATAVKEEYHDIVLPWIAKKSIECTKICELASLLFLHKVKLANEEAILTNNWKFFDEGDGIHIIEGCFFAVLRKYKEENDMVPEFRDIVELVSDELIKKRYEDGVYIYELGIDPGMKTWNATVRRHIDSGKEMNFKTSSKKYHYLTKQGVRNRKAKRWTRGFVAFEQNDRNDRTRYPQMPSPKGENWRDYISHRLRIMKKAIDVYTSERYTRLRFDKYIESNRVCDKIAAMLTNGKPCIIFLGAANISPNSPIKIKKNIRCPGNRKLIKSFKKMLGNVVKMVNEFRTSRLCARCFEPFPLETLGHRFKVCEWCVPDNNDWPEGLKLPEKIVTMKSKRMLLSERQELRDAMVANPNQAVGFVSKVICYRKNWRQNAAYDAVNNVAQLPGIIRDENVIDFTEDYMLLDDDFYVAEEEAILNTIWHRDIAAAKLIMYK

SEQ ID NO: 4726 - protein, 319 aa, Contarinia nasturtii
MFGQMQRQIEVFHQYAQQWHAFRRDGLITNNRPPKVNNFALVPLCRFQLKNVRLDMTDMYYLANTVLGVVPSSRNPLTNRMNKYTLDYYMYGHRDELWNMVFDMDKIKQIGKQKRFHSQIISNNVCVSILYEKPAKAWVENSEQATFNNMTYASAIDPNEKTWVANVRRHINSNIEENIKISNPRFHWQTEQKKGDRKADRLTWWYVKEEQLDLRSYPFIPSPRGSTWKTYIQHRIKMLRMRMKAYATRKYARLDLDHHIKATKTSDKVAMRITNNKPSWIWIGAGEMAPNRPWGIRKRKRCPGTRKLAISFKKQEHTK

SEQ ID NO: 4727 - protein, 379 aa, Contarinia nasturtii
VEKNDGLSEIICKKCLARLQIAYDFKRQAVESHRELRSFISNVNKQFKQVTGTKTKQKDGESESYDELEDDMQAIIDDEVEYKEIDVEFSDDTKKAIDREQLVEILGENNAITIRKTRAVKIQEDANNEAPENMEVYLVEEGHEGESGFILDEYDENGGELIVDDVDYLEDDDIDDLYETCLRVNIVREASEGLGGAWVENSEQATFNNMTYASAIDPNEKTWVAVVRRHIKSNIEENIKISNPRFHWQTEQKKRDRKADRLTWWFVEEEQMDFKSYPVIPSPRGSTWKSYIQHRIKMLRMGMQAYATRKYARMDLDHHIKATKTSDKVAMRITKNKPSWIWIGAGEMAPNQPWGIKKRKRCPGTRKLAISFKKQEHTK

SEQ ID NO: 4728 - protein, 852 aa, Contarinia nasturtii
MVETLTNNEFEWPSRDLMGNAFEYMHQQYLSNVTTQHTTHCEKELAYFLQMKRYQFNQEPYRLFKFDDIDIRNAIESIMRNKDWSEGDPVRKFKMNELFVAVKERCLPSFGDYLTMTQYIEKKWFESLYFFIQIQREISEFKAEHQQLVHAWLRHKKKPLLFEKPTQPLPPKIRNITVVPLCDNKLKHIRFDHKDLLALLARWKLIPEEFGGKDGGSSLYSNNHFEENPYDAWNILFDMKKINELKRPNQQFHRMIVCDSVSASVLFEIPKHEKTEFNRERIKQKLEAGDYTYIIPLDPGVNTYYAGFRRNIETCVEENIKISPKQYHWGARQGIRDKRAKHMTATFTKMEQSDREENYLVIPSPRGNGWIYYLDHRLKMMQDGLAAYARRRYARLSLDKYIDSQHETDWLAKSLTKNKPSLFTIGDADLPANSPIDVVRVDEAYTSQHCASCMVKCSKETKKFRFKACKNCPRNAPIPAEIAKYMSLPPLIVSKKGSRRKTLDRCVKKLIDRGLVNQANLPKESKPERLASPKMIEKYRPTQLNELVSHEEIIATISKFIDQNQLPHLLFYGPPGTGKTTSILACARRLYAPKDFHSMVLELNASDDRGIGIVRGRILDFASTRTIFSNGFKLIILDEADAMTNDAQNALRRVIEKYTDNVRFCIICNYLSKIIPALQSRCTRFRFAPLAEEQIVPRLDFVIDQERLNVSDDGKKALIKLANGDMRKVLNVLQSTWMAYKNITEETVYLCVGHPTPSDIKTIMNWLMSVESFEECFDKIQDLKMQKGLALEDILREVHLFVMRIELPPRVMSCLLIKMARIEQSLAAGCCEKPQLSSFVAAFQIARNMVSV

SEQ ID NO: 4729 - protein, 272 aa, Contarinia nasturtii
MPSPKGSHWLDYIKHRIKMMKHGICAYSTAKYTRLALDKHIKSSSVVDNWVEKVTDKQSTLFLFGADGEVPPDSRISIKKHVRCPGVRLTLRSIKKRRDCAIELVDEWGSSQTDARCMKRFQNQPKSARFKKCRCIPDARTLLPIKIVSKLGKKDLSEFRLLQRAMNEALEENEPLLSKVKSYYKNWQLNLECSVTWHRDVVAAKNILLKGLWTLLGLPIPDAINRYKARDAVAEAAEVAADVAEAAAAAAANVDNDVEMFEYDQQPADHAV

SEQ ID NO: 4730 - protein, 354 aa, Contarinia nasturtii
MIVCDSVSASVLFETPKHEKTEFNRERIKQKLEAGDYTYIIPLDPGVNTYYAGFRRNIETCVEENIKISPKQYHWGARQGIRDKRAKRMTATFTKMEQSDREENYLVIPSPRGNGWIYYLDHRLKMMQDGLAAYARRRYARLSLDKYIDSQHETDWLAKSLTKNKPSLFTIGDADLPANSPIDVFRVDEAYTSQHCASCMVKFPKETKKFRFKACKNCPRNAPIPAEIAKYMSLPPLIVSKKGSRRKTLDRCVKKLIDRGLEKTLYFDMFDTRGKIDVISVFMIDNNLAYPTNKLLYDFQQRHYNEVYPSFDKLERGKYPSRKRMKQMRDNGFDYLEYEDSILIPEMYGYERIE

SEQ ID NO: 4731 - protein, 508 aa, Contarinia nasturtii
MRVFELNDYANRYNYFNDLFGHADAAPNYDDVDVKNAVNYTYARRDTTNGDAERELRLGELLDELRAMGAPDDCNIRDFCKGDNWFESMRMWIEIQRDIRMFHLAYSDRHDKPKISNFTVVPKCYFQRRHICIDVQALYAILASAKLVPLKCGVRKGKNGSNNMINITKNEFTGADKEKSKEEKKEIQMKSWNLFFDLNTIGKWVNFKKDFHNMIHSDGVSVSVIYDKPKVEPLVLSDEQLLAAYRAKKFKYEFGNDPGERTWHASVRRDLETKEEVNMRISSKRYHWDAKQNRRNAKAELMTRLFTFEEQSDLKQMARTLGEIPSPRAFFKRGNCVIRMVDEYMTSQHCARCFRRFPIATRKDRYKKCVDCIPNPAVRLPTMIVTNVSKRALQMRREIERTWRLMREMGDAIVAAFRNAPNTRRLVSKKQCFLKTWQPNAVNVGIEEAAQAPVPVPITVVWHRDVVAAKLILYKGHCKLTNKPIHPNLVRPRRNINNVPLPFYGNQP

SEQ ID NO: 4732 - protein, 755 aa, Contarinia nasturtii
MSTTGETTAATAPRKKRYKFQTNAQKEKDADDDVNDNGLFAIKMRLNTILRPEFNHIVKPWIEQKSIMSTKITVLASLLFLDKVKSAQMNRQWEFFKNRTYPAKKGKKKGQLVEKNRGEEVIEQCFYAVLQKNKEGENMEPHFRQFVEELSPENNFAWPKNDYFGNHFKTLCQNHTRCLKTGQKTHCKKKLKNYLRMRAWQFNAVSTGWKFDKKDIDNAVDLMIRGYNAIRDTHQNADFKRHKRTLLTGMVTAIVREVGGPTNDHNIKDFSKGDYWFKATAMWLVMQTEIDEWHNWAQDNNVKIPNIKNLSVVPLPDYQRKAVFMCNDVFYRMLAESKQLPQVDGRQATESYIRQNKEFYWNQVFDLTTINRKLKKNKEFHYTIVSNGESVSIMYRMSKQHKQQMQNDDILRKQFIDGKFAYELGIDPGMKTWNATVRRNIETKKEVNMKTSSKKYHWLAKQKTRDVKAKRWTKQFTQEEQDDRNNRQLYQRMPSPLGILWIDYVHHRIKMLKKGMAVYTTPKYTLLQFDVESNRTVDKLTGNLVNHKAAIIHMGNAEISPNSCIRIKKHVRAPGTRKLLKGFRKRRNCRVRKTDEWGTSQHCAKCGRRFNPATRSHRFKVCENCGAEPDSIFAEYLPSKIVAQRSKRQLRYNKDDVELNLMRFWAEGLMTEQEFDIAAERLLSKVAVYPKNWQVNTPYAVDDENELEIEDKQLLMAVHKTSWDRDIVAAKCILIKDMGNTLMYIHMKSQDNVEY

SEQ ID NO: 4733 - protein, 462 aa, Contarinia nasturtii
MVRAIVEEVGGLANYENIKQFSKGKYWFKATAMWLVMQSEIDEFHNWAQDNNVTIPKIKKKHLQRLLDDDIVRKRYLDGTFVYELGIDPGMKTWNATVRRTISTRKEVNLTTSSKKYHWLTKYKMRDKKAKRWTKQFTLDEQNDRNNRQLYQRMPSPLGTLWTDYICHRIKMLKKGMDVYTTPKYARLKFDKYVESNSTLDKLCGTLVNHQAALIHSGNADMSPNSPIRIKKHVRCPGTRKLLKGFRKRGNFVVRKVDEYFTSQTCAKCGGRFDPNTKSNRFKVCENCAPVPNSIMANFLPSKIVAQLSKRRLKYNKVYIEESLAVFLARGEMTEHDFDIIADRLLSKVAVYPKKWQVNAVSGVLEYAGVKDDQQPHPVDDENAAEIDGEVAQQPCTVDDECVTEIDDKQQPMIVHQTTWDRDIVAAKCILFKGHCNLFGLDIPLTLQRPRRQQAVQNNQQP

SEQ ID NO: 4734 - protein, 355 aa, Contarinia nasturtii
VNLKTSSKKYHWLTKYKMRDKKAKRWTKQFTLDEQNDRNNRQLYQRMPSPLGTLWTDYICHRIKMLKKGMDVYTTSKYARLKFDKYVESNSTIDKLCGTLVNHQAALIHLGNADMSPNSPIRIKKHVRCPGTRKLLKGFRKRGNCVVRKVDEYFTSQTCAKCGRRFDPNTKSNRFKVCENCAPVPNSIMANFLPSKIVAQLSKRRLKYNKVYIEESLAVFLARGEMTEHDFDIIADRLLSKVAVYPKKWQVNAVSGVLEYADVKVDQQPHAVDDENAAGIDGEVAQQPCAVDDECMTEIDDKQQPMIVHQTTWDRDIVAAKCILIKGHCNLFGLDIPLTLQRPRRQQAVQNNQQP

SEQ ID NO: 4735 - protein, 775 aa, Contarinia nasturtii
MLPDFRQLVDAARIDWPTNGGFGNSFKYLYEQYEDNVRTNLKTHCESRLRKFFKLKTFQLNDNAIRYNYFNNLYGSPNELPYYDETDIKNAVNYAYHRKDNTNDDVERQLRLGELLDELRWLGAPEDCNIKEYVSENWFHSIRMWIHIQREIQWYHNEYKCRRDAPQIQNFVVVPMCSFQRRHIRIDTDALYTILASVKLVPLKCGLKKRKDKTTNSINITSNEFRRNKILSWNLFFKVEKIQQLVHFKKYFDFQICSDGVSVSMMYKKPKLPPLEISDAEIMKMYKGNKLKYAIGCDPGMKTWNASVRRDLDSKEEVNLRISSKRYHWDAKQGRRDAKAERITRLFTYDEKADRNRVAATLGTMPSPRETSWRSYIEHRLRVMNDGIETYTCKQYARLGLDKHIDSVRAIDKTACKLTRNQPSIFYMGASGSTPANSPIKIKKHVRCPGTRKLIAAIMKRGNCIIRMVDEYMTSQHCPLCFKRFPQETRRDRYKKCVGCVPNPIVGLPRTIVTNVSKRLLQMRRTIERMWREMRDIGDVIAATLRDGPNAGRLVSKKQRFFKTWLPNVANVEIEGAAGAQPTLTTVWHRDIAAAKLILYKVNQELALKYIDENENHGRKKTANLLKDDRFKALFSNPLFEVDKNADEYKMLTPVLSRLQKNKVKELKRKVEITMPFMDENEKAPSSDDDLFSEKAEDEEMESSDDDDRAWEKDLKQTYRQIRIDQKIKSFAGDENSTENENETDETTPAFAKTSKEKGKDIEFKVSNITAKANK

SEQ ID NO: 4736 - protein, 232 aa, Contarinia nasturtii
MYDSNELKYAVGCDAYVERFRTMRFAYQRRGEFAYIQQAISLQRMRNKADVMQKPNESHDYLHSKGKLIYARLGLDKHIESVRAIDKTACKMVHNQPSIFYMGSSGSTPANSPIKIKKHVQCPGTRKLLVAIMKRGNCIIRMVDEYMKSQHCPLCFIFFEMDRMQDYGHWTLLGLPNRKFRYQRRSIDICTKLAEDSEVAAGVAEAAAAASANVDNDVEMFEYDQQPADYAV

SEQ ID NO: 4737 - protein, 817 aa, Contarinia nasturtii
MKTWNATVRRHIDFDKEFNMSTTGETSAAQAKKKRYKYQTKKQQEEEAEDENFNDNGLLAIKMRLTTIVRPEYHDVVIHWIEKKSVMSTKISVLASLLFLDKVKSAQNNRQWDFFTNRMYVNQKGKLVEKNRAEDVIERCFYAVLQKNKENEDMEPHIRHFVEQGLSRDNQFAWPNNNYFGNIMKSLCQSYTRQLKTNQTTHAKKRLRNYLQMRAWQFNAVSTGLRFDKKDVDNAIDWAIRRYDAIRDTHQNAPLKRYKRKLLLDMVRAIVEEVGGLANYDNIKQFSKGKYWFKATAMWLVMQSEIDEFHNWAQDNNVTIPKIKNLSVVPLPDYQRKAVFMCNDVFYRMLAEEKLLPKVEGKQVTETFIRENKEHFWNQIFDFDKINRILKKNKEFHYTIVSNGESVSVLYKLSKQHLQRLLDDDIVRKRYLDGTFVYELGIDPGMKTWNATVRRTISTRKEVNLKTSSKKYHWLTKYKMRDKKAKRWTKQFTLDEQNDRNNRQLYQRMPSPLGTLWTDYICHRIKMLKKGMDVYTTPKYACLKFDKYVESNSTIDKLCGTLVNHQAALIHLGNADMSPNSPIRIKKHVRCPGTRKLLKGFRKRGNCVVRKVDEYFTSQTCAKCGGRFDPNTKSNRFKVCENCAPVPNSIIANFLPSKIVAQFSKRRLKYNKVYIEESLAVFLARGEMTEHDFDIIADRLLSKVAVYPKKWQVNAVSGVLEYADVKVDQQPHAVDDENAAEIDGEVAQQPCAVDDECVTEIDDKQQPMIVHQTTWDRDIVAAKCILIKGHCNLFGLDIPLTLQRPRRQQAVQNNQQP

SEQ ID NO: 4738 - protein, 715 aa, Contarinia nasturtii
MGRHKKADPNADQRCIKQGLPSIIRERYRDVIVAIISYLSVKATKIACLASLLFLMKAVLADNIGNISLMLPGFRNIVDAAHIDWPTNGGFGNGFKYIWEQYYDNVKTNLTTHCESRLRKFFKMRAFELNDYAIKYNYFNNLYGMIEFELPYYDEEDIKNAINYTYRRRNTAIGDVEREMRLGELLDELRWLGAPDDCNIRDFVKEDWFKSIRMWSEIQRDIRNFHFAYEDRRDKPQIKNFVVVPMCTFQRRHIRIDTDALYVILSNAKLVPRKCGKRTRKDGTTNFKNITSNEFRTNKILSWNLFFDVEKILKLVHNKKEFDSQICSDGVSVSLMYKKPKVPPVETTDDEIKAMYDSNELKYAVGCDPGMRTWNASVRRDLHTKEEVNLRISSKRYHWDAKQGRRNAKAERITRLFTFEEQADRNRIAAMIGEMPSPKGPSWRSYIEHRLRVMNDGIETYSTKQYARLGLDKHIESVRAIDKTACKMVHNQPSIFYMGASGSTPANSPIKIKKHVRCPGTRKLLAAIMKRGNCIIRMVDEYMTSQHCPLCFKRFPQQTRRDRYKTCVGCVPNPIVGLPRTIVTNVSKRLLQMRRTIERMWREMRDIGDVIAATLRDGPNAGRLVSKKQRFFKTWLPNVANVEIEGAAGAQPTLTTVWHRDIAAAKLILYKGECVVFKRTIHPNVRRPRRVDNNQPLPLYRGQNQNVNNGHLQPQ

SEQ ID NO: 4739 - protein, 554 aa, Spodoptera frugiperda
MAACKTCGGSDHTRTSSKKCKNYLPPIRKRNLSESTQLEIYTVKRGLASCLCPLLDPEKKLKLLTEIRRDVRDLSRVYIELGVWYNYYMKTSTELPPKPDVLNFIYAMKGKGPYNNVYSTMFSERKFDDKLRSFVVQEMAKQYETVLHTNISTHAYSRLARYFNVKRNDPALFSAFFKKVLPDDNEEMRRVCSIINVDTVGGAKWWSTIPEWLKIQAKLEDFRLFPQPSHGLKHITYTSRGWHELLRRVDPKSITGNWPKIIDHRRELWAPWLDINMIKFGCTLQTDGFSVSLSMSRIKREPSTSQPQKRSKKSYDRIIAVDPGSRIPVAVVESRRFKFQRVTKKYVRSHTLEWKRARVKDKLCRVSEEAEQKAREKLDFPVSSKNMSHVVEYTVFRMHWFNVRQEPYEKHAKLSRLKLDKYIRTAKCEEKIIKEIFDDGSNTLVLYGAGSKFMNKASFSGRKFKHDSLIKRLRSKPNIDVAVVDEQYTSQACSSCNATTGQFQKIVMNHRLRWGVCPNCNSEFDRDTNAAKNILINYTRSTLCRPGCSTNGAS

SEQ ID NO: 4740 - protein, 554 aa, Spodoptera frugiperda
MAACKTCGGSDHTRTSSKKCKNYLPPIRKRNLSESTQLEIYTVKRGLASCLCPLLDPEKKLKLLTEIRRDVRDLSRVYIELGVWYNYYMKTSTELPPKPDVLNFIYAMKGKGPYNNVYSTMFSERKFDDKLRSFVVQEMAKQYETILHTNISTHAYSRLARYFNVKRNDPALFSAFFKKVLPDDNEEMRRVCSIINVDTVGGAKWWSTIPEWLKIQAKLEDFRLFPQPSHGLKHITYTSRGWHELLRRVDPKSITGNWPKIIDHRRELWAPWLDINMIKFGCTLQTDGFSVSLSMSRIKREPSTSQPQKRSKKSYDRIIAVDPGSRIPVAVVESRRFKFQRVTKKYVRSHTLEWKRARVKDKLCRVSEEAEQKAREKLDFLVSSKNMSHVVEYTVFRMHWFNVRQEPYEKHAKLSRLKLDKYIRTAKCEEKIIKEIFDDGSNTLVLYGAGSKFMNKASFSGRKFKHDSLIKRLRSKPNIDVAVVDEQYTSQACSSCNATTGQFQKIVMNHRLRWGVCPNCNSEFDRDTNAAKNILINYTRSTLCRPGCSTNGAS

SEQ ID NO: 4741 - protein, 554 aa, Spodoptera frugiperda
MAACKTCGGSDHTRTSSKKCKNYLPPIRKRNLSESTQLEIYTVKRGLASCLCPLLDPEKKLKLLTEIRRDVRDLSRVYIELGVWYNYYMKTSTELPPKPDVLNFIYAMKGKGPYNNVYSTMFSERKFDDKLRSFVVQEMAKQYETVLHTNISTHAYSRLARYFNVKRNDPALFSAFFKKVLPDDNEEMRRVCSIINVDTVGGAKWWSTIPEWLKIQAKLEDFRLFPQPSHGLKHITYTSRGWHELLRRVDPKSITGNWPKIIDHRRELWAPWLDINMIKFGCTLQTDGFSVNLSMSRIKREPSTSQPQKRSKKSYDRIIAVDPGSRIPVAVVESRRFKFQRVTKKYVRSHTLEWKRARVKDKLCRVSEEAEQKAREKLDFPVSSKNMSHVVEYTVFRMHWFNVRQEPYEKHAKLSRLKLDKYIRTAKCEEKIIKEIFDDGSNTLVLYGAGSKFMNKASFSGRKFKHDSLIKRLRSKPNIDVAVVDEQYTSQACSSCNATTGQFQKIVMNHRLRWGVCPNCNSEFDRDTNAAKNILINYTRSTLCRPGCSTNGAS

SEQ ID NO: 4742 - protein, 401 aa, Bradysia coprophila
MERRSKEFHYEILTDGVSVSIAFRRKNAKPLPESFEELAAQQAQKYRQFGCNLENKSYDLMVGVDPGYKLYIAALIKDTRTNTEKHIKISSKSFYSMTRQNYRDKKSKKWTAEYETVAKLDREDVNVYDEYPSSLTPQYMNYISHCMKFFHRGHERPYTTRKYSRLQLDQYIRTQQSMDSIVHTLTDNVGNGRILVCIEGKPFNPSSPIKKYRRCPGIRKLFQCLKKVPVCDVMFVDEYNTSKACGCCYRSFDQPKHKHWDTRKIRHRVCDDCHPDAEIISLPNTIIAPKSQRQLQTEKREVRHLIYQDNPSISWNESAQLANLKFAFLPEHKKHNQFQKVPFNPAIHKAVQKTVWNRDISAARNMIVKGVCALSNIATPASLTRPATAPVADSDTSDEDY

SEQ ID NO: 4743 - protein, 908 aa, Bradysia coprophila
MTGRDKSLKVPEETEQPPQAGASRDESLSSRRSFETEQVEIIDLQRDVQITDQMHVELEEIGNSIGAPIIYRPKRWSNTIGRTKEFDLVLIRIPHFLPAITAPTIEISSDTEEKSQRVSTSKKRKLQTKNVGDTSQRGNTSKKRKLQDFSASKTKSTKGENPSPRDGSPTPSDGNDKPNNAPKRKRENRYTKKEDRTYKSITVVKCALGSLLKADHRTIITDCIEDMCRHATKICVLGSLAKLDFVNEEYNDESDVFDQDPAPYIQRIFEGVTQGGYFDFIGHLPVNFRTLLEQSDVERPSRSCLNNAIKNLHQMYLTVFHTNIKTHAKRRIVKLFTWWHILDHNRKPNKQETKSFQAAANFAFNRRSRCNRNAALIDRLVEYIPDNITADNRDSNERGFLQDLLQKQHFFRIVPLFVNIQRDIDAYQLYCIRHYQRMLMSNFAVVPLHSYKTKHIQIDSDTWRLLLQHLEIHPTKWNAKRTKEVGLTSKEFKANEREHWLAYLNEKTLKRMERNGKRFKCSISTDSVAVSIQFESDKDPRPESFETLKNKQKAKYKQFKNRYENGEYTRMIGLDPGYKLFISGVVRDDPANEERLVKLSSRQYHNMTCQNIRDRKSKNWTDDFERRCREEREAHRSTYQSVISPQSRTYRVYIAHRLQHFNEGIDLYTMKKYTRLQFDKYKRAQSTIDNIVNDLVTPVSSGERNLFVVGGTEFPSNSPIKKYRRCPGVRKFVDAVKKRENCDVVFVDEYNTSQVCGKCFRYFKGNAYEKARHERWERQGHRHRTCSDCEPTSDYYLQLPSSIVTRESPHAITIDVLARTQRMFTNHNVTYNEAAAASKQIYYANGEARYRKVFEKQANYINRDTPLKTVWNRDVSAGRNILIKGLCLINRRRPPASMDRPAQEEDNQ

SEQ ID NO: 4744 - protein, 209 aa, Bradysia coprophila
MDGIVNELLPPSRSHEQSLLVIGGTEFNPSAPIKKYRRCPGVRQLVKFVRKKTRLDIVYADEYNTSQVCGRCQRCFKTSVDETIQHKRWERKGARMRMCSNCTPNDNVIPLPTTINTRMSPRAQHLHRLAITNRLFFNMSAYSMEDAKRESDNIHYIHIAENCCYDVSLYKHTFDPNDRMTQLKCVWNRDISAARNILIKGVAFICSVV

SEQ ID NO: 4745 - protein, 1053 aa, Bradysia coprophila
MDSPPKLPNVAAVGRRKNVIPKKPPVSSNVNVNVLDSPPKLPNVAAAPKKPPVSSAAINAALLIATTKDRSSSPSNATAASNPAINITSHRNTTSSIIGSGRTGSTQEVAHPLPIRQSPPPMEYGSEWDTDGEATIAQLKQMQRKRPSKKAHSTSTKPEVKQTPVQSNRKRAASTDEASDAVEATTKRSTSTKRSKASKRSKATKTQQDSADEAGDADQETTKRSTSTKRSKASKRSKVTKTQQDSADEAGDADEATTKRSTSTKRSKASKAQQRKDDDENGNRAVIQTQLEEIIFLGNVFDKSIRRFTCPFATCNVNYSTFLNLKNHVKKTHEETLQKPIETDTNNWRRIQNANNRFDITTVKQKLRPLIIDGETIIKKQRVLEPLATEKTEVATKVFDIMNKQAVELSKLAILFSSLVYFDVYNTISDPENGNEIDRIFEEEFNWKEMILEFKQFQRNTAKAKKPRPAKHNTFFDLCRKYDVETYFTETSQNAWNSIVDTFATNFKTNITTHLYSRIRKWLAFKLRDGKKKKDVCGKENRKDINNKIYHTWDEKETFHTMHFPIDTKALFDILKNLPQFKAILNQAEFLELQIDDDPNRKTTNPFWYFLFNIQKMETATKKFGGRITTNGSDVSIQYCKLRKEKELTKAEILEMASNRKRKHDVIDSDSESESEDDDDDDDDDNAKTIKTDPAIVSALTNITNMEDLSVSGVDLGVRNVAATVIRKWSKSSDGYEVHESNVLHKSKDYHYKAGFARRQRKGKKLHGEFDERYQKDRQSQPIEPSQRSPDYIKFLNSRLKWFNEGTATYMQRVVTNVKFDKFRSTQKQMMAMAKEIVGDINVHDKATTQPSKIRVVFVGNCSTPANSTIKGHRRSPGNAPIVRYLKQIPQTYVDATIDEYCTTKKCSRCYETLDDVEFSKERLKLCHNCKLAENSTSTNLVSTYQRKQVIAEAMIPITEDYPKPTQFERAQRVAMERTKRWSFGDKMRMAARIKLKSTTYTVNTTATLKHLYWNRDGNAARNIMQLGLCQYNDCLPIEFNKDEAFQRPKKKD

SEQ ID NO: 4746 - protein, 1128 aa, Bradysia coprophila
MIKYLINQLTSGDVGDTDSASETNDNSEHNTATTTVTDSPPKLPNVAAVGRRKNVIPKKPPVSSNVNVNVLDSPPKLPNVAAAPKKPPVSSAAINAALLNATTKDRSSSPSNATAASNPAINITSHRNTTSSIIGSGRTGSTQEVAHPLPIRQSPPPMEYGSEWDTDGEATIAQLKQMQRKRPSKKAHSTSTKPEVKQTPVQSNRKRAASTDEASDAVEATTKRSTSTKRSKASKRSKATKTQQDSADEAGDADEETTKRSTSTKRSKASKRSKVTKTQQDSADEAGDADEATTKRSTSTKRSKASKAQQRKDDDENGNRAVIQTQLEEIIFLGNVFDKSIRRFTCPFATCNVNYSTFLNLKNHVKKTHEETLQKPIETDTNNWRRIQNANNRFDITTVKQKLRPLIIDGETIIKKQRVLEPLATEKTEVATKVFDIMNKQAVELSKLAILFSSLVYFDVYNTISDPENGNEIDRIFEEEFNWKEMILEFKQFQRNTAKAKKPRPDKHNTFFDLCRKYDVETYFTETSQNAWNSIVDTFATNFKTNITTHLYSRIRKWLAFKLRDGKKKKDVCGKENRKDINNKIYHTIKFLFDSEKCTQAEEVQHELICELQKICQFPNFNHGGRSYFERLRYDFKEDGDDDLGKPKRKRKCAAPKKTTKKSKKKKKKTQNNGPRLNWFQMVPAMAILNQAEFLELQIDDDPNRKTTNPFWYFLFNIQKMETATKKFGGRITTNGSDVSIQYCKLRKEKELTKAEILEMASNRKRKHDVIDSDSESESEDDDDDDNAKTIKTDPAIVSALTNITNMEDLSVSGVDLGVRNVAATVIRKWSKSSDGYEVHESNVLQKSKDYHYKAGFARRQRKGKKLHGEFDERYQLKWFNEGTATYMQRVVTNVKFDKFRSTQKQMMAMAKEIVGDINVHDKATTQPSKIRVVFVGNCSTPANSTIKGHRRSPGNAPIVRYLKQIPQTYVDATIDEYCTTKKCSRCYETLDDVEFSKERLKLCHNCKLAENSTSTNLVSTYQRKKVIAEAMIPITEDYPKPTQRAQRVAMERTKRWSFGDKMRMAARIKLKSTTYTVNTTATLKHLYWNRDGNAARNIMQLGLCQYNDCLPIEFNKDEAFQRPKKKD

SEQ ID NO: 4747 - protein, 327 aa, Bradysia coprophila
MSYGIEIETVAKRTSKSKKKRKFAQQLHSDGESVTILYESELKPVLNVENKIRKIKKNYAQDKYKYRTSIDVGFNTYIAAKRLTIETGKEVNLKLKSKHYHRGTRNNNRKKKFQRLVGDYERRAATDRESYAVMPTPTGPSYCIYVRHCLQFWTESIRVYTRAPYARMAFDKYVYSQKKIDSIVTLLTNKQPSLFLIGGAEFSPNSPIKGHVRCPGIRKFTQALIKYDNCDYLFVDEYNTSQHCGLRLSRFPTWTKKARYKRCENCPTAELAIPQAPVIITTPKRVYQRQRKSGNVGDKTRRYIKTALTPSTNQLALGYFGMLFDRL

SEQ ID NO: 4748 - protein, 520 aa, Bradysia coprophila
MEVFEADPTFIIDTEPDFRVMFAVLIEDGKGINRENTMEMVSNYMGMRTTHNVNGTRKYNGSHKTEAIEDLADTYKTCLANNITEHTYQHLRKFFKEIQPKIQSYDTLGYLFSYDEKHVPNNTLLNALQTELLVPPTRAYFASIHKDWYVHIPMLLRLQRWRNQRNLHNFRIFPIFHHRRRFIHFDTMALHQFLNSISKVKYEAVKHSKTYENNLWRHLFSIDKWLPAHEDNNRPDDYQGPRFHKSYRTDGVISLWFGEKNRFLMKNNFCRDISDRLASNDFDEIVALDPGGRLSFAGIRRDARTDAETTIKYSSSAYRYDSRQYATKNKYRQFTKQHAEQMQTARNQVQNKASRTADPTTYINFELEHFEVNCNVLMHKYLARLNFDRFVWRQRATARLGRQLAYGERYITDLQQQRRRERNRKWRYRKKRRQRIEINPNAPPDKYVTLHNTPIPPRVLLFAGDTDVSPFIKGYVKSPNRRIMKETSKFATVVQVNEFRSTMLCSRCFQPCVTAKSPHR

SEQ ID NO: 4749 - protein, 372 aa, Bradysia coprophila
MRLQKWRYSQGLRNFRVFPIMKQRRHFIPYEKTSFHKLLNSLHKFDYQKKFETEHHKFACNFRTDGVTVNIMMRRKKIPKIDNKEFLHAVGEQFANNEFEDIVAVDPGCRLSFAGIRKTGSVESNFRYGSTSYRYDSSQYRINRIYRRFTNDLQRKLQLERQTLPYNASSKADPEQFMNFILKNFDNTNDVMMAKFLAKLNLRRYVGKQRAIKKYVKLLTLGQERIDAIDMERKRLRRKNRKRKKLNYQTALNSTMQTVRKKRNETTDAIEPVRKRVLLFVGSTEIHPIIKGYVRSPSEAILREASKYAVIVRVHEHRSTMLCSTCFEPCITSKSPHRWQYCRPCNKTWNRDINGFRNIFYLGVHLVQGSFI

SEQ ID NO: 4750 - protein, 260 aa, Bradysia coprophila
MQKIMHAYFEWHVKNDTKSFRVFPILGKRRHYVQYDDQAYHQFLRNWRISSTHYDDFDENVLWRRYFKIDEVESDGHTFHNHIRTDGVSVSITMKRKKRSVADNAQRMTQANAKLKRHEIKNFRAYDPEKYNRLANPLLRKLQNDRETLPNKACAVLDFNEFINFELKHFCETNEVLMSQAITKLRFQRFISREKAITELAKALVGSRTATNTTIVFCGSTEQNPVIRGTAKQYLHTSDKPKPHTRLDTINQRRAMRQIC

SEQ ID NO: 4751 - protein, 536 aa, Mercenaria mercenaria
MMQDSNSRHSDDLENQTTMKRKRSLSPLTLWKAAHVFKHQNLECWFQFAKDGESHNKVFASDFERTKKQIKLEDEKPFLTTFSVGIRPTQNQKRVLNQMLRVSNHAYNWSNYLVREKNLKPKLYDLQTYVCRTNSSDVPMEFRMDTNDDWYFNNKMTQIKKAACKNFCTMYKSALTNQRKNKKYTKTVILKDKDDTNPSQGAFEIQKQYIRTLKETDSDDNDILHHCVSANADNFSTRRKNVNRFLLLSKPVRKLPPIEHAVKIVKTAKGKFVLKIPCDPKYTRSKWYEEPFDTMCGIDPGGRAFLTIYDPSKPQAFQIASRCKAPSKPVRKQTKKKGKKWHRKKKSQRRVRSIIEKIDGLHAKIDYVKSKMQAAIRRKQPQAKIDRQRQLQKVYYRLGNAIRWVHLRCTYNLMQYSYVAIGEIGIPSIIRRQCNGKRRHINKKSVRHLTVWNHCKFRERLVYRAKGTKTNVIVQDESYTSKTCSECGTINDKLGGSETFKCINPSCDYITNRDVNGAKNILRKSLGIGSIKTYRA

SEQ ID NO: 4752 - protein, 477 aa, Mercenaria mercenaria
MKRKREQMTLWKAAFVNGRETFKSWIDKARMLELNCDVSSASSTHYSDLNLKTKCAKMEDKFMCTFSVGIRPTSKQKRTLNQMLKVSNHAYNWCNYLVKEKDFKPKQFDLQRVVTKTNSHDVAAEYRLPGDDWSFDNKMSSIKLTACKNFCTMYKSAQTNQKKTKVDLRNKDTALLREGSFEVQKMFVRLLTEKDILDERIRQSRIALMPESFSKSKKDWKERFLRLSKKVSKIPPLSHDMKVCKRPNGKFVLQIPCDPKYTRRIQVHSSDSICSIDPGGRTFATCYDPSNIKAFQIGPETDKKEVIHKYHEKIDEVHRLLAYAQKKKQTQAVQDRIGQLKKHLKLKTYVHDVHLKLCSYLVKNYKLVVLGKISVSSIVRKDRPNHLAKSANRDLLCWQHFRFRQRLLHRVRGKDCEAIAQDERYTSKTCGNCGVKNNKLGGKETFICESCNYKTHRDVNGARNILCKYLGLFPFAA

SEQ ID NO: 4753 - protein, 270 aa, Mercenaria mercenaria
MPESFSKSKKDWKERFLRLSKNVSRIPPLSHDLKEYKRPNGKFVLQIPCDPICKRQIQVQTSDSICSIDPGGRTFATCYDPSNLTAFPTGPKEDKINVIHEFHDKINWVHHLLSCAQKKKQMQAIQDRIEQLKKLHLKLKTYVDDVHLKLCSYLVKNFKLVVLGKISVSSIVRKDRPNHLAKNGNRDLLCWQHFRFRQRLLHRVRGTDCEAIAQDERYTSKTCGNCGVQNNKLGGNETFYYKSCNYKTHRDVNGARNIPCKYFGHFPFAT

SEQ ID NO: 4754 - protein, 519 aa, Mercenaria mercenaria
MNRKRSLSPLTLWKAAHVFKHQNLECWFQFAKDGESHNKVFASDFERTRKRAKLEDEKPFLTTFSVGIRPTRNQKRVLNEMLRVSNHAYNWSNYLVREKNLKPKQYDLQTHVCKTNSSDIPMEFRMDANDDWYFDNKMTTIKTAACKNFCTMYKSALTNQKKKKKYIKTVTLKDKDDMNPSQGAFEIQKQFIRTLKETDTDDNDTLHHCIAAMPDNFTTRRKDVRNRFLRLSKPVSKLPPLEHAVKIVKTAKGKFVLHIPCDPNYTRSKRYDEPFDSMCGIDPGGRTFLTIYDPSKPRAFQIASRCKAPSKPVRKRTKKKGKKWHRKKKSQRRVGSTIDKIDGLHAKIDYVNSKMQAAIRRKQPQAKEDRQRQLQKVYYQLGNAIRWVHLRCTYNLMQYSYVAIGEIGIPSIIRRQCDGKRRRINKKSVRHLTVWNHYKFRERLLHRAKGTKTNIIIQEESYTSKTCSECGTINNKLGGSETFKCTNPACDYITNRDVNGAKNILRKSLGIGSIKTYRP

SEQ ID NO: 4755 - protein, 519 aa, Mercenaria mercenaria
MNRKRSLSPLTLWKAAHVFKHQNLECLFQFAKDGESHNKVFASDFERTRKRAKLEDEKPFLTTFSVGIRPTRNQKRVLNEMLRVSNHAYNWSNYLVREKNLKPKQYDLQTHVCKTNSSDVPMEFRMDANDDWYFDNKMTTIKTAACKNFCTMYKSALTNQKKKKKYIKTVTLKDKDDMNPSQGAFEIQKQFIRTLKETDTDDNDTLHHCIAAMPDNFTTRRKDVRNRFLRLSKPVSKLPPLEHAVKIVKTAKGKFVLHIPCDPNYTRSKRYDEPFDSMCGIDPGGRTFLTIYDPSKPRAFQIASRCKAPSKPVRKRTKKKGKKWHRKKKSQRRVGSTIDKIDSLHAKIDYVNSKMQAAIRRKQPQAKEDRQRQLQKVYYQLGNAIRWVHLRCTYNLMQYSYVAIGEIGIPSIIRRQCDGKRRRINKKSVRHLTVWNHYKFRERLLHRAKGTKTNIIIQEESYTSKTCSECGTINNKLGGSETFKCTNPACDYITNRDVNGAKNILRKSLGIGSIKTYRP

SEQ ID NO: 4756 - protein, 519 aa, Mercenaria mercenaria
MNRKRSLSPLTLWKAAHVFKHQNLECWFQFAKDGESHNKVFASDFERTRKRAKLEDEKPFMTTFSVGIRPTRNQKRVLNEMLRVSNHAYNWSNYLVREKNLKPNQYDLQTHVCKTNSSDVPMDFRMNNDDDWYFDNKMTSIKQTACKNFCTMYKSALTNQKKKKKYIKTVTLKDKDDMNPSQGAFEIQKQFIRTLKETDTDDNDILHHCIAAMPDNFTTRRKDVRNRFLRLSKPVSKLPPLEHAVKIVKTAKGKFVLHIPCDPTYTRSKRYDEPFDSMCGIDPGGRTFLTIYDPSKPRAFQIASRCKAPSKPVRKRTKKKGEKWHRKKKSQRRVGSTIDKIDGLHAKIDYVNSKMQAAIRRRQPQAKEDRQRQLQKVYNQLGNVIRWVHLRCTYNLMQYSYVAIGEIGIPSIIRRQCNGKRRRINKKSVRHLTVWNHCKFRERLVYRAKGTKTNVIVQDESYTSKTCSECGTINDKLGGSETFKCINPSCDYITNRDVNGAKNILRKSLGIGSIKTYRA

SEQ ID NO: 4757 - protein, 459 aa, Mercenaria mercenaria
MMQDSNGRHSDNLETTTKTKNNICENWLLTLIKAACCLRSKQTTTRNRKRSLSPLKLWKAAHVFKHQNLECWLQFAKDGEAHNKVFASDFERTRKQVKLEDEKPFMTTFSVGIRPIRNRKRVLNEMLRVSNHAYNWSNYLVREKNLKPNPYELQKYVCKTNSSDVQNDFRMENNDDWYFDNKMTTLKTAACKYFCTMYKSALTNQKKKKKYIKSVSLKDKDDINPSQVDFEIQKQFIRTLKETDTDDNDILRHCVSAIANNFTTRRMKKKSQRRVRSIIDKIDGLHAKIDYVNSKMQPAIRRNQPQAKDDRQRQLQKVYYQLGNANRWVHLRCTYNLMQYSYVAIGKIGIPSIIRKQCNGKRRRINKKSVGHLTVWNHCKFRERLVYRAKGTKTNIIQDERYTSKTCSECGTINKKLGGGETFKCTNPACDYITNRDVNGAKNILRKSLGIGSIATYRA

SEQ ID NO: 4758 - protein, 307 aa, Mercenaria mercenaria
MPDNFTTRKKDTRNRFLRLSKSVSKLPPIEHAIKIVKTAKGKFVLQIPCDPKYTRSKQYDEPFDSMCGIDPGGRTFLTIYDPSKPRAFQIASRCKAPTKPIREKVKKKGKTWRRKKKSQRRVGSIIDKIDGLHAKIDYVNSKMQAAIRRKQPQAKEDRQRQLQKVYYQLGNAIRWVHLRCTYNLMQYSYVAIGKIGIPSIIRRQCNGKRRCINKKSVRHLTVWNHCKFRERLVYRAKGTKTNVIVQEESYTSKTCSECGTINHKLGGSETFKCINTSCDYITNRDVNGAKNILRKSLGIGSIATYRA

SEQ ID NO: 4759 - protein, 342 aa, Mercenaria mercenaria
MLNVSNYAYNWCNYLVKEKNFKTKQFDLQRIVAKTNSHDVSDEYRLSGDDWFFENKMSSIKLTACKNFCTMYKSAQTNQKKTKVDLRNKDIAQLREGSFELQKLFVRLLTEKDIPDERIRQSRIALMPDIFSKSKKDWKERFLRLSKKVSKIPPLSHDMKIGPETDKKRVIYEFHDKINWVHHLLSCAQKKKQTQAVQDRIGQLKKLHLKLKTHVDDVHLKLCSYLVKNYKVVVLGKISVSSMLRKDRPNHLAKKGNSDLLCWQHYRFRQRLLHRVRGTDCEAIAEDERYTSKTCGNCGVQNNKLGGNEKFHCKSCNYRTHRDVNGARNILCKYLGHFPFAT

SEQ ID NO: 4760 - protein, 519 aa, Mercenaria mercenaria
MNRKRSLSPLTLWKAAHVFKHQNLECWFQFAKDGESHNKVFASDFERTRKRAKLEDEKPFLTTFSVGIRPTRNQKRVLNEMLRVSNHAYNWSNYLVREKNLKPKQYDLQTHVCKTNSSDIPMEFRMDANDDWYFDNKMTTIKTAACKNFCTMYKSALTNQKKKKKYIKTVTLKDKDDMNPSQGAFEIQKQFIRTLKETDTDDNDTLHHCIAAMPDNFTTRRKDVRNRFLRLSKPVSKLPPLEHAVKIVKTAKGKFVLHIPCDPNYTRSKRYDEPFDSMCGIDPGGRTFLTIYDPSKPRAFQIASRCKAPSKPVRKRTKKKGKKWHRKKKSQRRVGSTIDKIDSLHAKIDYVNSKMQAAIRRKQPQAKEDRQRQLQKVYYQLGNAIRWVHLRCTYNLMQYSYVAIGEIGIPSIIRRQCDGKRRRINKKSVRHLTVWNHYKFRERLLHRAKGTKTNIIIQEESYTSKTCSECGTINNKLGGSETFKCTNPACDYITNRDVNGAKNILRKSLGIGSIKTYRP

SEQ ID NO: 4761 - protein, 497 aa, Pythium ultimum
MLVWMEKFVDKHPKTKGARVYSLLPVATTFQAAYVKLNASTLHGPLARLIDLPEVEDFLKKELSIVPTRKRTGSQLPFDKKTFQKNRSEVIRKVFDVEQFETLDRKFADEIKTNGYGTSITMTRSVTTVSVALVEKKASKKKRMKNDGTAELVSKEKTARKKKVKTPEEIAEEDTFAKELFKLGPDYSPNVLIGIDPGMRSLATAVSVGHLQRRRRRQKSRRGLHRRHQTRRVRRKERVIEISTPEYRHLARMNDFRFYNENLKMREPWHAGVIRAMPSFKISSYDLYFQHLQFFWKHLRFLLVFSAEQAFLCWRFTQDRAKTKALDTLAKRIVPKANKQVCIAYGDWSRRDGLKGHASGPVKGFVEALKRRATVIPMDEYRTSITCSCCHQRLKQTRLFTKMKRKEDEVDIRQKEQPSKKEVKEIVEMAKFKNLKLADKKVVLKCTRNVLRCTNSKCKANFWNRDVNAARNMLELLKSGLEEKHGARRLRAFRRGQ

SEQ ID NO: 4762 - protein, 630 aa, Pythium ultimum
MGRKRKKDDCPEEWDVVDETQDPDAIPPLFEIVAEMQDSDAEVDVVTNALSQLPPPSQKSLAPPTNRIKETTKEINSSVICKLTRICKFPLLVGEIKKVCVAMKQVQLEGWHLANLHILRCLKEGDEVPKIEQMFFYQCCTATLGNIEKRDRGSTESKYPAFHKTCLRCWAGRERESTYEPEFIQTAGDMVSEMAKLMEINALNMIALHFRQRLHQYIQFRYAKKGDTKLKYRETRRLVDSCYRVKSEPEKDDEGNPTGKTAKVWTEWDDTDDPVEQELREWLGIAPWQWQIRANPAHFLHKLYDMLVWMEKFVDKHPKTKGARVYSLLPVATTFQAASRHSIASKKKHMKNDGTAELVSKEKTARKKKVKMLEEIAEEDTFAKELFKLGPDYSPNVLIGIDPGMRSLATAVSMREPWHAGVIRAMPSFKTSSYDLYFQRLQFFWKHLRFLLVFSAEQAFLRWRFTQDRAKMKALDTLAKRIMPKANKQVCITYGDWSRRDGIKGHASGPVKGFVEALKRRATVIPMDEYRTRITCSCCHQRLKHPTERAASKKEVEEIVEMAKFKNPKLADKKVVLKCTRNVLRCTNSKCKANFWNRDVNAVRNMLELLKSGLKEKHGARRLRAFRRGQ

SEQ ID NO: 4763 - protein, 201 aa, Pythium ultimum
MTRHLALFGLVTCLLDLLKQLPTLQISSFEDYLNQLQVAWKHLGLLGDFSTKHTFRKWRFYQTRFRQKALHGISRQLVPTPDPKVCVAIGNWRSQTCLRGHAHGPVKCLTRELEKRATVLVVDEYRTSKRWSRCLHELCNKTYPVVGEDSSVSRKRSYAVLCCSNLDCGTTWDRDMNGAINTSQLAVRMRLGFPRSPELSR

SEQ ID NO: 4764 - protein, 201 aa, Pythium ultimum
MGMRRALFGLVTCLLDLLKQLPTLQISSFEDYLNQLQVAWKHLGLLGDFSTKHTFRKWRFYQTRFRQKALHGISRQLVPTPDPKVCVAIGNWRSQTCLRGHAHGPVKCLTRELEKRATVLVVDEYRTSKRWSRCLHELCNKTYPVVGEDSSVSRKRSYAVLCCSNLDCGTTWDRDMNGAINTSQLAVRMRLGFPRSPELSR

SEQ ID NO: 4765 - protein, 201 aa, Pythium ultimum
MADAVALFGLVTCLLDLLKQLPTLQISSFEDYLNQLQVAWKHLGLLGDFSTKHTFRKWRFYQTRFRQKALHGISRQLVPTPDPKVCVAIGNWRSQTCLRGHAHGPVKCLTRELEKRATVLVVDEYRTSKRWSRCLHELCNKTYPVVGEDSSVSRKRSYAVLCCSNLDCGTTWDRDMNGAINTSQLAVRMRLGFPRSPELSR

SEQ ID NO: 4766 - protein, 402 aa, Pythium ultimum
MLVWMEKFGDKHPKTKGARVYSLLPVATTFQAAYVKLNASTLHGLLARLIDLPEVEDFLKRELNIVPTRKRTGSQLPFDKKTFQKNRSEVIRKVFDVEQFKTLDRKFADEIKTNGYGASITMIRPVTTVSVALVEKKASKKKRMKNDGTAELVSKEKTARKKKVKTPEEIAEEDTFAKELFKLGPDYSPNVLIGIDPGMRSLATAVSVGHLQRRRRRQKSRRGLHRRHRTRRARRKERVIEISTPEYRHLARMNDFRFYNENLKMREPWYAGVIRAMPSFKTSSYDLYFQRLQFFWKHLRFLLVFSAEQAFLRWRFMQDRAKMKALDTLAKRIVPKANKQVCIAYGDWSRRDGIKGHALGPVKGFAEALKRRATVIPMDEYRRASRALAATSASSKLVCSPR

SEQ ID NO: 4767 - protein, 622 aa, Pythium ultimum
MKSAGKRKRRRKPETDDEQEDLPATVIEEKQKRRRPDVIARRVANADTAVSVVKTTLNSFCKEEGKALSWESVLRDMNKAVLEAYVLANIHVVRLRQASLPIEPLNQNFFHRCMTAVSSGIRESQDCEQLKQSVALYNEWRASDVSRANIEYVARGWQQNAAKMMATNATNAINLNFYRRFHKFLKRKYGFNGRQAYATLKSILDPKYKEEDPIVIEWRARIPRKHDGKLDCKPHPLTLTYMFLSDIEERNQVNKTTPDYVEIRSFSLLPYKRGFECSHFKVCKTGLRALLKRARVDVPYEGAGWNEVADNWWRVFFHIDKFETANRKFDGEIVTDGKSVSIVMRKPKRESVTSELNAKDYDVVWGLDPGRTDLFVATNQYGEKIKCSSREFYDHARYKKRNQKIKIWQENRPAVLEVIRNMPTKKTAQLERLKEYVKFMIPRMDLLLKFAMVKPFRKLKLRSYIFAQKKLRELCLKLTAQGGRRTIVGFGDWSNQDIGGLIKKCPAGPVKPLERMLRKYCRVESIDEFRTSKLHNDCHRSLDHQYSKRKCRDGKERTLKVHGVLHCKNNGCHGMTVNRDVNASKNMLLLLQLKMRGEDRPPAFCRASTQEEEQQVSTSAVS

SEQ ID NO: 4768 - protein, 802 aa, Pythium ultimum
MVRKRKKDDYPEEWDVVDETQDPDAIPPLFEIVAETQDSDAEVDVVTNALSQLPPPSQKSLAPPTYRIKETTKEINSSVICKLTRICKFPLLVGEIKKVCIAMKQVQLEGWHLANLHVLRCLKEGDEVPKIEQMFFYRCCTATLGNIEKRDRGSTESKYPAFHKTCLRYWAGRERESTYEPEFIQTAGDMVNEMAKLMEINALNMIALHFRQRLHQYIQFRYAKKGDTKLKYRETRRLVDSCYRVKSEPEKGDEGNPTGKTAKVWTEWDDTDDPVEQELREWLGIAPWQWQIRANPAHFLHKLYDMLVWMEKFVDKHRKTKGARVYSLLPVATTFQAAYVKLNASTLHGLLARLIDLSEVEDFLKKELNIVPTRKRTGSQLPFDKKTFQKNRSEVIRKVFDVEQFETLDRKFADEIKTNGYGASITMIRPVTTVSVALVEKKASKKKRMKNDGTAELVSKEKAARKKKVKTPEEIAEEDTFAKELFKLGPDYSPNVLIGIDPGMRSLATAVSVGRLQRRRRRQKSRRGLHRRHRTRRARRKERVIEISTPKYRHLARMNDFRFYNENLKMREPWYAGVMRAMPSFKTSSYDLYFQRLQFFWKHLQFLLVFSAEQAFLRWRFTQDRAKMKALDTLAKRIVPKANKQVCIAYGDWSRRNGIKGHASGPVKGFVEALKRRATVIPMDEYRTSITCSCCHQRLKQARLFTKMKRKEDEVDILQKERPSKKEMKEIVEMAKFKNPKLADKKVVLKCTRNVLRCTNSKCKANFWNRDVNAARNMLELLKSGLKEKHGARRLRAFRRGQ

SEQ ID NO: 4769 - protein, 802 aa, Pythium ultimum
MVRKRKKDDYPEEWDVVDETQDPDAIPPLFEIVAETQDSDAEVDVVTNALSQLPPPSQKSLAPPTYRIKETTKEINSSVICKLTRICKFPLLVGEIKKVCIAMKQVQLEGWHLANLHVLRCLKEGDEVPKIEQMFFYRCCTATLGNIEKRDRGSTESKYPAFHKTCLRYWAGRERESTYEPEFIQTAGDMVNEMAKLMEINALNMIALHFRQRLHQYIQFRYAKKGDTKLKYRETRRLVDSCYRVKSEPEKGDEGNPTGKTAKVWTEWDDTDDPVEQELREWLGIAPWQWQIRANPAHFLHKLYDMLVWMEKFGDKHPKTKGARVYSLLPVATTFQAAYVKLNASTLHGLLARLIDLSEVEDFLKKELNIVPTRKRTGSQLPFDKKTFQKNRSEVIRKVFDVEQFETLDRKFADEIKTNGYGASITMIRPVTTVSVALVEKKASKKKRMKNDGTAELVSKEKAARKKKVKTPEEIAEEDTFAKELFKLGPDYSPNVLIGIDPGMRSLATAVSVGRLQRRRRRQKSRRGLHRRHRTRRARRKERVIEISTPKYRHLARMNDFRFYNENLKMREPWYAGVMHAMPSFKTSSYDLYFQRLQFFWKHLQFLLVFSAEQAFLRWRFTQDRAKMKALDTLAKRIVPKANKQVCIAYGDWSRRNGIKGHASGPVKGFVEALKRRATVIPMDEYRTSITCSCCHQRLKQARLFTKMKRKEDEVDILQKERPSKKEMKEIVEMAKFKNPKLADKKVVLKCTRNVLRCTNSKCKANFWNRDVNAARNMLELLKSGLKEKHGARRLRAFRRGQ

SEQ ID NO: 4770 - protein, 671 aa, Pythium ultimum
MGRKRKKDDYPEEWDVVDETQDPDAIPPLFEIVAETQNSDAEVDVVTNTLSQLPPPSQKSLAPPTYRIKETTKEINSSVICKLTRICKFPLLVGEIKKVCVAMKQVQLEGWHLANLHVLRCLKEGDEVPKIEQMSFYRCCTATLGNIEKRDRGSTESKYPAFHKTCLRYWAGRERESTYEPEFIQTAGDMVNEMAKLMEINALNMIALHFRQRLHQYIQFRYAKKGDTKLKYRETRRLMDSCYRVKSEPEKDDEGNPTGKTAKVWTEWDDPDDPVEQELREWLGIAPWQWQIRANPAHFLHKLYDMLVWMEKFVDKHPKTKGARVYSLLPVAATFQAAYVKLNASTLHSLLARLIDLPEVEDFLKKELNIVPTRKRTGSQLPFDKKTFPKNRSEVIRKVFDVEQFETLDRKFADEIKTNGYGVSITMIRPVTTVSVALVEKKASKKKCMKNDGTAELVSKEKTARKKKVKAPEEIAEEDTFAKELFKLEPDYSPNALIGIDPGMRSLGTAVSVGHLQRRRRRQKSRRGLHRRHRTRRARRKERVIEISTPKYRHLTRMNDFRFYNENLKMREPWYAGVIRAMPSFKISSYDLYFQRLQFFWKHLRFLLVFSAEQAFLRSRFTQDRAKMKALDTLAKCIVPEANKQVCIAYGDWSRRNGIKGHASGPVKGFV

SEQ ID NO: 4771 - protein, 671 aa, Pythium ultimum
MKQIQLEAWHLVNLHTLRCLENGLPLPDYSNKTFFDHCCAGVSTTNKTHHIAQKNPDLWESIKIYQSQRERAGLSEVTHLIGYGDLKYELREQMVVNAGVMIREHFRTRLRLYVDITFGGLGDTLTKKQKKEKADLVKAIMHACYSVDETDVVEALQMRDILTPDGVGWSEQWIPWPDRIKENGMAFYVRLLWEFQDVVEKRMEAVPNEKGVQAFSLFPVSTNYSRAHIKINGTTLAGFYSRIQQRVPEYRWDLPSVSLSVRSFKENRWTVMRRAFDIAQFETRLSECPLSKAEFAQLSVEEKYEHASHLFANQVTTDGYSASVLMYRPMTEEEKADKESEKKYEEKADKGPVVPPGYVPNVMIGLDPGMRAICTAVREDFRPESQGDRPPRRRGRRQPRRSHRRRRSTRKKKSDRPHWIKRPKAPRHRNGRDIVSVTTREYRHLAGFNRCRVWNEGQKKRHPEYQAIITKMPSFKTASYETYLERLEYFWRHVRFLMQFCVDRPFLKWKFFRKRMARVAVDEIARRIVPTVSRQTCVAYGNWSRHKGIKGHAPSPVKGLKEALRKRATVVSMDEFRTSKLCSQCHQPLSSVSYSVNTMLPKRKKRKGMVLARNRAEIEFEEKECYAVLRCDHKDCEARYWDRDVNAAINMLELLKSEVLGLGRMEAFQRP

SEQ ID NO: 4772 - protein, 563 aa, Pythium ultimum
MKYELRQQMVANAGVMLREHFRRRLCAYVKVVYPNAKEKDVLHGCYNSEPTKLEEVQEMRALLTPDGVSWCEEWIPWPNRITDDSKIEFYIRLLWKFQRVIEDHIEANPGRSTKGVRAFSLFPVATSYTASHIKINATTLAGLCSRVKKKDPETGGDCSITKWWGVDHIKIDHNAFAAEKWTVMRKAFDIDAFETLRPDTDVSQADFRHMTVEEKYAHASHLFANQVTTDGYGASVLLFRTKNELDEAEKQQSERLVPEGYRPEVVIGLDPGMRSVCTAVRERFVPGQIKRVRRRSVRKKRRRKRSWIRRYDGPKRKNGRDIVEVHAKEYRHLAGFRKRRTWEEVLKNSNPEYGTAIRGMPSFKTSRYKVYLERLHYFWKHAGFLLEICWRKPFLKWKFFNKRSSRIAVDALAARIVPDPSVQTCIAYGNWSRRDGIKGHASSPVKSLQQALAKRAKVVILDEFKTSKLCSTCHRELSPVSYLVNPDLDKRRKRAGKIISRYHSEERKLVECHAVLRCDQKKCEASYWNRDVNAAINIVNLLKYEIEHGGRMAAFARVQDRRD

SEQ ID NO: 4773 - protein, 871 aa, Allomyces macrogynus
MADTTLPVDAVPSDAAPVAEPILPAPVEDVAPGLAPSVPALSAVAPSDQARAPIVSVVPQTLHHALVDAPEYLAVRAVIEARSERLVNAHGFAATEATLYLRYRARRAYEDFRDALLYAEEDYESSNDMVSLLKAVTVADQQADYLVFGIPNCDQLDQYATEYLHHVHYPNTPFVNRSFFTRSFEYLFQEIVKNGSEHFHRTFRYAAGRCINPFAVLVESWPPPAPPRDQRAVEPPANRRMRRDFYAAIDKWVTTICRRGSKLQLDKFLYKCACIIVDYNLFILQNPEYARATSGLVPDLGVLHVPVPFVPPPPAAADDEAQGQVEQQDSVHLPRFIPEGVRIAAETLPRNRHARRKQGKAWIAPAVADHFAVARRWFCPDLTIFPHMALKRRHVRLDSMDITRGLLAEFPGNSPDLLHVVFGLIMKHAHLDSLVPGASDLNVPDEQYELALEQYAWQKLRDISPQLARLRTKFCSDPSISPVLSGYWQKPRVDGAPRVGSSFTTNGYAAHILISRVPTDDDVRRVGGEGEIKQKSTRRVVTRGPGRAVAAKSLHSRLGTGEFAAIKSRSLIVSDYPKGLIAVDPGQSTLMTKTTLTPFRVGAFANGWINIKWEITRRRNPGYKSWSIPGPRWSAATGQRNQTLQILRLRQHQSDLEQIESRLPAVHDPTLAGIIVLAKAVTTNMERILGFKMDRRYAKYDLQATIAKQRALAYLRNKFTGYGVLFGNKGAVQINRVTRMPVKGVIRYLLVYGIDVLLVDEHRTSKFCAVCGSEFEATPAMKVNRKFAYRYLHCPSCKYVVNRDVNASWNMFRVALRDVFDIYVADSMLKHPLALLPSRGAPRPLLPQPGDDDFDDSAHDRYSGNHGGPGG

SEQ ID NO: 4774 - protein, 644 aa, Coccomyxa sp.
MRRPKKPPKDPQLRLQEQYLVYAKNKLFKEKKVKEKAVREDVKERAVTNAHSTFTVVKTTWRSLCKRAARLLDLETALREVNTTIAEAYLLANVHVVRLCTAGIPLCKLNQSFFYQCLSAVSVSEREKPEIEDFELRMSVKLYRSWRPQGYQPPDSTNLSSGFHQQASRQMATNMRNSTVANFYRRFKRYLKLRYSLDGKQAYEALLAIRAAEYEGEDPLVKRYRDMLPPKPEKSRLEDNPELVMPLQHHFLRAFEAAQADQQAEKPPRLFSLVPTKQGFECSHIKICSSGLYGLLRRSGIKDLPSSKGFPGKADAFWRRFFHISKFETTNRRFAGEILTDGKGVSIVLRKPKVEPAAKGAPLDPDTFGEVWGLDPGRREMFVASNDAQRVQRVTTRQFYHDAKYRESNAKIRVWQDHDPDILEAIRNMPSKKHSHLEGLQAYVSYLLPMLDFLLRWHMCKAFRDLKFKRYVFAKKVLRTICQNLTREAGQNTLVGFGDWSNQDSAGIIKKSPAGPVKRLENELRRHCRVVSVDEHLTSKLHSCCHHRMKQMYQRRVCRDGVMRSVKVHSVLHCDNNGCHGMTVNRDVNASRNILHILRATAGGGPRPEAFHRSRTKYSEAPATSGLPLNGQSTLALLPVPDSH

SEQ ID NO: 4775 - protein, 366 aa, Arabis nordmanniana
MKTLKLRIRDKHASQLNILAGSVNFVWNYVNELSFKHLKRTGKFFSAYDLATYTKGSGEYLNLHSQTLQAVTETHAKARKQFKKAKLNWRTNNPKAKRRSLGWIPFKKTAIKHISTRQSGRKSLKSTLQFSLAKGKKLTIDLWDSYNLSLYSINTCELVQDNSGHWYACVTVKEFPKTACGTGQVGIDLGCKESAVTSNGDVLTTKLTHKYAERLAIAQRAKHKKRVKAIHAKIKNTRLDLIHKFTSKLVKANNLIVIGKIKSTSFTSTNLAKSVYDAGWFEIKRQLDYKCKNAGCHYIEVNEAYTTQTCSCCGSRQDSPKGRADLGIRVWFCSSCQTVHQRDVNGAKNILAVGLDRLYIIIAQNL

SEQ ID NO: 4776 - protein, 419 aa, Tilletia indica
MADPPPAPWIGSVAPESVLWPGVEDTQQAAEWYNAPIDSWFLPKFAHLPHPVVPDENIGGMLTQLSATLRQRLDAVPPPPPPRRTRPGERQDNSRLKTYRTRLRPNTQQKEALRKTAGIVRWTYNRAVAYLKAHPNASFHDVREHSVTEDGLPLMNLSWVTPVPYSIREQACFDAHTALRNGLADVRAGKIPNFELKFRKKRALFSSFRIRTRDWDGGCLKIPNFGLGPGQHQTRIQTGIEVPSLEHDGACIKQENGSWFLLWQKDMGEEKMRVPAARGPEMCAIDPGVRTFATVYDPLRGMAAKFGDGDHKRLFRLGTHLDDLISRSTQASAKKRYRMRRAANRLRARIRNLVDELHWKLRSYLKRGFDTVLLPKFNAHQMSRRGQRRIGRNTVRAMMTWAHGRFRSRLNEAMEVPFS

SEQ ID NO: 4777 - protein, 458 aa, Phytophthora plurivora
MLTWMEKFVKEHPKTKGTRLYSLLPYSTSYANCYIMVNGTTLRGICTRIFKRTGWKLDWIPLAPRGGLVLTSFFQQNRSSLLREIFNVAQFETRVPDCSVTRVEFDAMDHETKKTYASRYFADQVSTNGYGASVLLTHPKDVNEFPEESNDKVLMDSRDPFEKARKCLPTGYSPDVMIGIDPGMRTLCTAVSVGRLPRRRARRKWLKERRRRKRKRLNRQYRRGQKITEISTGEYRHMSKMNHFRAWNERLKKREPWYASVVHAMPSFKTASYEQYVNGLSFFWMHLRFLLAFYAENPFLKWRFTQDRLKAKALDALAKRIVPKPGPQVCIGYGDWSRRDGIKGHAMGPVKGFVKALKKRATVLPMDEFRTSKLCSCCHKCLKQTPLFTKVRQEKDEGKKKIDFKIVLKSNRNVLRCENSRCEANFWNRDVNAARNMLELMKGYFQNLGRMTAFVRGG

SEQ ID NO: 4778 - protein, 421 aa, Dunaliella salina
MESTEKGNTKKRGKVNQTWKLPANKCRKIKITPSHEVANQLKRWFGSVRVTYNWTLECVKKKPDVHKCTNMISLRKRFINACNIPKEKGFLLDTPKHVRDTAIKDLTEAYKSNFAKRKLNPSHTFDLKFRSKKDTQSITIPSSVIKEFVLRDGKQNGDFSMYPTYLKNKVKFHVRKNRCNIPDIENDCKLVLDKLGRFYLAIPFYEPACENQASYNKKEWCAIDPGVRTMLTIYSPTLGECYKIGDQDISKIFRLCKHLDPAGSGADKLIGKKTIKKTRKEKALTRLKMKIKNLVTEVHCKAIAFLIKNFSNIIIPPFNVSQMVKKGERKLNKKSVRSMLTWRHYEFKQHLKERALQCGVKVYERSEEYTSKTCTHCLIIKENLGGAKVYKCDNCHLKADRDVCGARNIFIKNALECGRRF

SEQ ID NO: 4779 - protein, 415 aa, Dunaliella salina
MEGSTEKGNTKKKGKVSQRKKLPANKCKKIKITPSLELVNQLKKWFGSVRVTYNWTLECVKKKPYVHKCTNMISLRKRFINSCNIPKEKGFLLDTPKHVRDTAIKDLTEAYKSNFAKRKLNPSHTFDLKFRSKKDTQSITIPSSVIKGFVLRDDKQNGDFSMYPTYLKNKIKFHVRKNRCNIPNIENDCKLVLDKLGRFYLAIPFYEPACENQASCNKKEWCAIDPGVRTMLTIYSPTLGECYKIGDQDISKIFRLCKHLDKLIGMKTIKKTRKEKSMTRLKMKIKNLVTEVHCKAITFLLKNFSNIIIPPFNVSQMVKKDERKLNKKSVRSMLTWRHYEFKQRLKEKALQYGVNVYERGEEYTSKTCTHCLMMKENLGGSKVYNCDHCHLKVDRDVCGARNIFIKNALECGRYY

SEQ ID NO: 4780 - protein, 361 aa, Phytophthora nicotianae
MEAVPNEKGMTVEAKYNYASHLFANEIKTDGYNASILYYRPKKDEPKRGEDDLLVSAGYLPDVVIGPDPGMRSVCTAARQYLRPQAPRRPKQRRVRRPRRQKKKNKKRKRNFPKWIRRPKALRLGQRPGREIVSVTTREYRHLAGFNRFRAWNKSQKRKFPEYKKVFDGMPSFKTASYEQYLKRLEYFWQHATYLVQFWKDRPYLKWRFFQKRMARVAVDTLARRIVPTPKRWHQGPRSEPGQEVERGTAEARDGGFHGRVQTSKLCSQCRQSLSSVQYPTPVFPKNGDKPKRKKVKGKVLPRDWSQAGIQSRHCRVVLLCENKICQARYWDRDVNATINMLELLKSEVQGRGRIQPFKCS

SEQ ID NO: 4781 - protein, 298 aa, Phytophthora nicotianae
MYNMTTGTSFSISRSLFAGEIVTDGKVVSIMMRKPKKEAGPARTYTEKDFDVVWGLDPGRRDMFVATNQFEESVSCSSKEFYEEARYTKAKQKIKGWQDRHPKVLEAIRNMRTKKTASPEKLKVYIAFMTQRMDLLLRSSQLKPFRRLRFRIFLFMTKKLRQLCERLTPRGKRVVVGFGDWSNQDVAGIIKKSPAGPVKVFERELARYCTVIPIAEYRTSKVHFECQRQLKNQYSQRLCRDGEIRTQKVHSVLHCLNNGCRGMTVNRDVNASRNMRRLLECKLRGQDRPLAYTRQARA

SEQ ID NO: 4782 - protein, 637 aa, Phytophthora nicotianae
MRRKRKKDDYPKDWDVVEESQDPDEYPPRVTRPDVIARRARNKIMGCVAVKTSLNTFCKRGGRFLPGRALPWEEVLADMNKGVLEAYLLANLHILRLLKENKEIPKLDGGFFRSCLSAVMKLLRYSKVKGELGESLKIYNSSRCARSPQANGGYINQGRSHNAGYQMATMTKNALSMNFYRRFHKFLKRTYTIDGKKAYTLLKGILSHEEYVRTGTRFDEIVLEWRAKVPRKPNGYLADEAHQLIPLTYLLLQDIEDRNTHGKDAIDEGELFQEIRVFSILPTKKGFQCSHMKMCQLGLWGLLKRAGFAAPKPGKGWEDVQHDYLHKLFNLKKFETETRKFAGEIVTDGKAVSIMMRKPKKEAGPARTYTEKDFDVVWGLDPGQRDMFVATNQFEESVSCSSKEFYEEARYTKAKQKIKGWQDRHPKVLEAIRNMPTKKTASLEKLKVYIAFMTQHMDLLLGFSQLKPFRRLRFRSFLFMKKKLRQLCERLAPRGKRVVVGFGDWSNQDVAGIIKKSPAGPVKVFERELARYCTVIPIAEFRTSKVHFECQRRLKNQYSQRLCRDGEIRTQKVHSVLHCLNNGCRGMTVNRNVNASRNMRRLLECKLRRPSLGLHSSGKSVITKKVLLSACGWPRSS

SEQ ID NO: 4783 - protein, 365 aa, Phytophthora nicotianae
MCRMHKQRGISTSRKSPRRSASMYPEGMEPPPQWAFETPKNFRFNALRKFESGVESTFSNLENGNISKFKFQFKSRKKDGRYFTFCEDAGNAKITYMDGAPRAMLSISKLKDIPIRCDRSIEIANEIQIMNTNGFWYAIIPQYVRPGDYVNRGRTIALDPGMKAFMTGVDLEGNAKNIGRGNKEHLDKYRARIQNAQQEMSTIKNFQGHRSGRQWRAFARAKRAFHCATAKLSNCVKEMHYQTSAYLTKHYDTIILPVFNSKDMVKKSSARNHTFNRLLLGLKHFQFRKLLQAKCELMGKSLVVCSEMYSSQTCGRCSKLHLRLGSRDVFSCPRCEHVAGRDVNAAFNVLRFVCAGSLSVSAIHH

SEQ ID NO: 4784 - protein, 291 aa, Phytophthora nicotianae
MKSKLALMDNESKAKHETMIRQGKKTKEKKKTQLHQALAANHKQVLLPSFNTSEMARKYEKLVTADGTPPTSSDEVTETAVQPRKGKKREIRSSTARAMLAQLHFKFKMLLKYKMECVGGRMIECEEEYTSKTCSSCGEIKDDLGGSSIYRCLFCHVELDRDVNAAKNIFHKNMPAPLRLQRHGAHNATDFARQIISPCSTVSIADTPTTNSPYSGTYASAPTLLSSSLSIITALSYRIDLDTQEMTRSSPISRHPVFYVVSSHSRTLPVRLQGIYVDWMGMLARRGCHVH

SEQ ID NO: 4785 - protein, 614 aa, Phytophthora nicotianae
MICIAFQIKERSPFYNPHRQSQVKMKRTVTYKDDDFVPDSGGESVPKKRKKKRREKTDLLHPSVWFKQEIARVLWMPRKTDLVSVRKPWRSRKKRRVRLCQRKKRKRTKKHGRRHERRTPAFARDRVPESQQLLEPLLTSWFDVDNLAQATPQSGWRTTSVPVAHRYQEIAEDLQELDIEYEEFFNSVIKIRLFPTKGHKEKPDQMFAAQRVIYNKMVAWSREDRTKRLTSRDKAVKMTMKAFGLKYRPIAKLGTMAEYFRNKRGLGRSMQVQNEVRESAYRDFMKATKSSIASKFAPSNSIEITARTFNVVEQHDQTALRFHPTFLGFNKNDGIAIHEDLPALTTSVRLQRLREREYYLIVPRKKELSRSKTERVCAIDRGYRNFVTVYDPDGPAFSVKDAHNVLKKKFEAVDAMKFMLAVKDNVCKDRHRDKVRTKMKKGRKSEEHRLRYLLRRRMRFTSRKAARCVNDLHQKLSCWLSENYHTVFLPSFQTQEMVLKPLNEVASDATPATGSEEDNATIKKRKMRSPTARALMAQAHFKFKQLLKYKMKRTGGRVVDCEEQYTSKTCSRCGVVKDNLGGDRVFRCTSCHAVLHRDVSAAKNILHKNISLLA

SEQ ID NO: 4786 - protein, 313 aa, Phytophthora nicotianae
MARTFKVVELYDQTALRFHPTFFGFDKNDGIVIHEDLPALTTSVRLQRLREGEYYLIAPRKKASSRSKTERVCAIDPGVRNFVTVYDPDGRTFSVKDVNNVFKRKFEAVDAMKSMLAVKGNVCKDRHRDKFRTQMKKGRKNPKSEEHRLRYHLRRRMRFTSRKATRCVNDLHQKLSCWLSENYHTVLLPSFQIQEMVRKHLNEVASDATPATGSEEDNATIKKRKMRSPTARALMAQAHFKFKQLLKYKMKHTGGRVVDCEEEYTSKTCSSCCVAKYNLGGDRVFRCTSCHAVLDRDVSAAKNILHKNISLLA

SEQ ID NO: 4787 - protein, 892 aa, Ectocarpus sp.
MESEENDSSKKPISGIKRKRAKSGSSDKAPGDDDENSHIHAKKELATWAVARGIKNPQTRVCSVTSSMDACVREDVPGKDVLLRQIDKDAKSLGILRHLVSVCLNVLAEKDPSNTLIVNRTFIQQLFTRISGNTLHKSTRPLHHPDLQSYLDESKLDDETLRQVEKFPLRCRDALCGEMMTSIKTHISGNFESRLVDHLSCRLERRLWECRDDEHFWASIPRAAKNIYEAAGQKTPEQALSIIRKFVDQKRGSEKELLRLEWGEAMEGLLSEFRGLFEPLRVKRPPPKDPPDHPKTEEELTGREDFLYNVKARLNDVLQIEAGCRKVDFHLRKRRGEIWSEVNERQQSIKSSKTKEGFLKQRHLLQEIPVPPWFDEGIEMSKKDASNLVRDVRNTRRDMWKSMKEPGTEHPPKAFSLMPHFSLTRAFVRYDSQSIGTLAKSLDFPGVSENQVTLKTTGVKCAGRAERLWWTGIFDFYSERIVNRRPSTEKNQTQRTRKVLRLNNRYRKGIGVCNKDPWFTDEVLYSAKRDDPSCETPWIVNSISTDGLQVKVCLATLAKTNPLPKGVKELVKKGYASIQDKLRVSKSSKGVFKEAFPLYDTEKSRLSSPDNHIEVVGLDPGQVSVYATVRANITSPETFKASDFKGSQSSISSREYKHQSLTRFSARAEVGRRLDNVEYGQAVQAFDSVSLKQPDSSVAYSSVIYCTLRVRVVELLSEERRLQKFARLRARQRTVDGMARDIAFGNTYRQEVRKEQRSSAEPLSPERRKELLKKIRDKRRVVFFGNGQFGHGARGACPRKALIRALGVLCPVVLVDEFRTSKCCCSCGVPLKQVDGSRVFRCSSQMDEGRSCPVRYIDRDANGSANIGVCGVFQLLGFKRPSFLCRKSSEGK

SEQ ID NO: 4788 - protein, 893 aa, Ectocarpus sp.
MESEENDSSKKPISGIKRKRAKSGSSDKAPGDDDENSPDIHAKKELATWAVARGIKNPQTRVCSVTSSMDACVREDVPGKDVLLRQIDKDAKSLGILRHLVSVCLNVLAEKDPSNTLIVNRTFIQQLFTRISGNPLHKRTRPLHHPDLQSYLDESKLDDETLRQVEKFPLRCRDALCGEMMTSIKTHISGNFESRLMDHLSCRLERRLWECRDDEHFWTNIPRAAKKIYEAAGQKTPERALPIIRKFVDQKRGSEKELLRPEWGEAMEHLLSEYRGLFEPLRVKRPPPKDPPEHPKTEEELTGREDFLYNVKARLNDVLRIEAGCRKVDFHLRKRRGEIWSEINERQQSIKSSKTKEGFLKQRHLLQEIPVPPWFDEGIKMSKKDASNLVRDVRNTRKDMWKSMREPGTEDPPKAFSLMPHFSLTRAFVRYDSQSIGTLAKSLDFPGVSENQVTLKTTGVKCSGKAERLWWTGIFDFHSERIVNRRPSTEKNQTQRTRKVLRLNNRYRKGIGVCNKDPWFTDEVLYSAKRDDPSCETPWIVNSISTDGLQVKVCLATLAKTNPLPKGVKELVKKGYASIQDKLRVSKSSKGVFKEAFPLYGTEKSRLSSPDNHIEVVGLDPGQVSVYATVRANITSPKTFEASEFKGSQSSISSREYKHQSLTRFSAKAEVGRRLDHVEYGQAVQAFDSVSLKQPGSSVAYSSVIYCTLRVRVVELLSEERRLQKFARLRARQRTVDGMARDIAFGNTYKQEVRKEQRSSAEPLSPERRKELLKKIRDKKRVVFFGNGQFGHGARGACPRKALIRALGVLCPVVLVDEFRTSKCCCSCGVPLKQVDGSRVFRCSSQMDEGQSCSVKFIDRDTNGSANIGVCGVFQLLGLKRPSFLCRKSSEGK

SEQ ID NO: 4789 - protein, 425 aa, Drosophila neonasuta
MGYVKRRQTFRVYPTGQQEKDLSRLFGCTRVVRNHFIDLMRDAHDQGTPLGLGVAEKAATTQLKRAEGYEFLNEVSSVALQQAARNTTRSFREFFRSCSGSRSKVGFPRYASKRNRQTASFTKAANFHIRQPQGCRWGFIRLPKITGELKFRACRDLDWATVGTVTITRSPSGVYEVSVTHDVEPVILPETVTACGIDLGLTSLAAVVSSSGDRQLVDNPRFYRRSKRALASAQRKLSRTTKGSSNRRKAAAKVAKIGRKVACQRKDHLDKLSRQLVNDNQVIGIEDLSVAALSRSLRLSTSVYDAGWAMFRDMLTYKAADAGRELVVADRFYPSSQTCSVCGRRDGKKPLNVRSWTCVGCSSPLDRDFNAATNLMLYASEAAGHVDSLNACGGSVRLRLAGAVSREAGTHRSRRETGAVGIPVL

SEQ ID NO: 4790 - protein, 381 aa, Drosophila neonasuta
MQPKVVKRAYKYRFYPTPEQADQLARTFGCVRYVYNRALAERSRAWTQEQRRVTFADTSKMLTAWKRDEETTWLTEPSKGPLQAALRHLQAAYDKFWRKQSGYPKFKKKGKTRDSATYYANCFTFRDGKVKLAKQKEPLDIRWSRPLPEGVVPSQVTVSRDNQGRYHISILVEEVITGLPKNDSAVGIDAGITTLYTLSTGEKIANPRHEKKDREKLSKAQRALSRKQKGSRNRAKARRKVAKIHGRIADRRRDHLHKLSTRLVRENQVIAIEDLSVRNMVKNHSLARAISDASWAQFRTMLEYKADWYGRDVVAIDRFYPSSKTCSACGALQGPMPLNIREWTCPGCGGTHDRDINAAKNILAVGLAVSACGDGVRPSRT

SEQ ID NO: 4791 - protein, 215 aa, Synchytrium endobioticum
MTDIPSACTSQYQDYIHRPRYLVRHLETLVDYHDKAKSSRWDRYKRKQRALHEICMSIRGSGTKDDTVVIWGNGNFTSLGRKQGAPTKALKRHARRYMHIITYDVYMTSQRCSHCARRGVPEAVADDPMLSGYVRAQGKSGHVLMAKRTRANRLASVLEDAGCFGVQNCQPLHVLRYCETCSTVWDRDYNAARNILYCFLYERAFAKRPRLFKRV

SEQ ID NO: 4792 - protein, 321 aa, Synchytrium endobioticum
MSEECLFYLLFDIPSFQKTVREVAGVDAKATRAAFMKNPSKGRLLDEVFLLPPEMLAKSRYVLDDSPRRYVRTSSFKTNGLVLCLLWIDTTSKPSPPDRKVEDAINLPNIFSNKSLQSTHKDAWIIALDPGVSCIVGAVAYDPNHPDQRRNLAVTTKGLAEPERRYRDWLEADKPEAICTAERECTKSDQETWAVFLRRFVTSYDIARAYYSTKKYKRKRWDADKAKRGELDRVLEGIVNMVDESMGRKLSGGKKVIVAIGMGDFSSTKSRHVMFIRGYLEHDERPAYLKPPSKNKNTPMKRKVDEGGTSRGGPSKSRKTR

SEQ ID NO: 4793 - protein, 386 aa, Trebouxia sp.
MGPLPVTEWSLQRRPESYLPWLQLVLKDFEEAQDTPDAPKLFSMLPQSNNNTKFITISSTSLQKLLLATGIANVPSLTAKAGAKEFTQHQESWWNQYTDCISFSKRAQQSRRRFKFQVQTDGISVSVLMFQPFPSTQTDTATAATAAPPPPPGRKRKRQQRSSRAAVGAWVQGLPNRHLVQPARIVGLDPGRKALFTAVVHSQQAADSLQGERPAQHRYNSLSWSCSRWQEAAGIKYRLHKTELWISRKPELHAALLATPTAKVASSAQFLHHIRHRMQHTAAAQIHFGDRRHRQLRWRSFIKRQQAYSAICKEISGGRKDTVVAYGDAKFSSSCCKGNPSTPTVSLRRKVGHCCQRGVAKIADPTATVCDCVSTQHVLVYCGTGT

SEQ ID NO: 4794 - protein, 381 aa, Gigaspora margarita
MRYAYNIVVRWNKNRRFCNSSKNFEWIKPHTLNEKLKLYIDVKEGKDLNEKDKKLQRSCVWGERKFLRTVAWLELRLKGLHDKVPANIIDESIDDALTARKNIIQKNLKETKKSSLSFKSKKDLRQTMTICMQNFSKKDWNHFYVTQLHSSLTLLSKRCKPNKLESGKRDLRPFHFEKKRKHNKWPLQKIDCDCKLTYLRKTNEWIFHWVYEAQKQIRETQADVHVIAIDPGVRTPFTWYSSTKGVGKIGEYDIGRIFRLCKHMDNLISKKDRLTSSISKRKKKKALRVDKAIFRIKRKIKRLRDEVHRKTIKFLTDEFDMIIIPPFKVSGMTCSWCGNIQNIGGSEMYNCKNCGIKIDRDVNGARGIFLRTLLDGAMILS

SEQ ID NO: 4795 - protein, 368 aa, Androctonus mauritanicus
MKTLKLRIKDKHANQLNKLAGSVNYAWNYVNDLSYKHLKRTGKFFSAYDLNEYTKGSGELLGLHSQTLQAINETHAKSRKQFKKAKLNWRTNRPDAKRKSLGWIPFKKSAIKHLHTRQTGKKALKSTIQLSLSKGQKLIIDVFDSYNLSLYQINTLEIVQDSRNRWYACITVKDFPKQISGKGSVGIDLGLKESATTSNGDKLTTKQTQKWAERLAIAQRAKNKQRVKAIHAKIKNSRLDAIHKFTTKLVKDNALIVVGDVKSRSFTNKRTKLAKSTYDAGWFELKRQLEYKCKYAGCQLEIVNESYTTQTCSHCLKISDSSPKGRAGLGIRGWRCAECGTWHDRDINAAKNILAVGLDRLAEGIPSL

SEQ ID NO: 4796 - protein, 245 aa, Androctonus mauritanicus
MRVINGYGYIDIDEIIDKVPHLKREDIRKINISNSTLYGYKRNPNKLFNAKFNHIIAIAQYIQQNTIYIGMDIGGKNYIGTSKTDRSKTYIDKSKEIEYILKKYDNRINHKKYDDIVAYSKLKTSLTNHISKNIKDIVKRNQAKTVYVLGEVPNYRNSIISLIFDLTYNVLQRKIKQEDEIILINERHTSILCPECGYKDKKNRTKSNGFQCKNCEFQHDNNDIVAASNIANRAYKKGCFKYGEI

SEQ ID NO: 4797 - protein, 200 aa, Phytophthora chlamydospora
MPSFKTAVYNTYLERLQYFWRNAAFLLQFSVDRPFLKYKFFRKRMARVAVDTIARRIVPDVSARTLVAYGDWSRRRGIKGHAPSPVKGLKEALRKRATVVSMDEFRTSKLCSQCHHALSPVRYVVDIMLQKRRKRKGFVVARNRAEIQLENKKCHGVLRCDHASCTARYWDRDVNAAINMLELLKSEVLGRGRMEQFRRS

SEQ ID NO: 4798 - protein, 484 aa, Phytophthora syringae
MYACYNVEETDCAEALQIRDLLTPENEEWSEKWIPWSNNIKDNGMAFYVRLIWVFQSVVEARMEAVPNENGVKAFSLFPVSTSFVTGHVVINGTTLHGFLARIRQRTGDNLFAEWNLPGVTLSVASFQQNRWSIMRRAFNIGRLETRKEDCPFDKPAFLQLSLDQKYEHASHLFANEIKTDGYSASVLYYRPKDVEPEQGEDDPLVPAGYSPNVVIGLDPGMRSVCTAARQYFRSKAPCKRNRRKIHRPRRSERKKVRFKKRKRNFPKWIRRFKGLRRRQQRPGREIVGVTSREYRHLAGFNRFRAWNESQKRKFPEYKSVIDEMPSFKTASYEQYFKRLEYFWQHAAFLLQFSAERPYVKWRFFQKRMARVAVDTLARRIVPTVSHAPSPVKGLKEALRKRAMVVSMDEFRTSKLCSQCHQSLSSVQYPTPVFPEKSRSPRERRSRAKFCLAIGPRLRSSRATATSCFSVRTRPVRLDTGTET

SEQ ID NO: 4799 - protein, 406 aa, Hydra viridissima
MQRIQAYKYELQPNGEQQRRMRRFAGSCRFVFNKALALQKERYEQGEQKLGYAGLCKLLTEWRNSAATAWLADAPVHPLQQTLKDLERAYSNFFAKRANFPRFKKKGQSDSFRYPDPKQIKLDQANSRLFLPKLGWLRYRNSRDALGDVKNVTVSPSCGNWYVSIQTEREVEQAMPQGGAVGIDMGVTRFATLSDGTFYAPMGSFKRHEVALRKAQQAMSRKQKFSNNWKKAKARVQRIHCRIGDTRRDYLHKTSTAISQNHAMVCIEDLQVRNMSKSAAGTLEAPGRNVRAKSGLNKSILDQGWFEFRRQLDYKLAWRGGWLVAVAAQNTSRTCPCCGHVSADNRQTQARFECVQCGFEENADVVGAINVLRAGHARFACEVSDAVGSPAAGTHRSESGAVQCRP

SEQ ID NO: 4800 - protein, 423 aa, Cotesia chilonis
MDKSEVHSSTYDAYYNGVCKSNGIGEWFNENRINSKEVSKNFWKFVPLFLQIQHEMYDQGKLSFNVFPIYSHGLKFITYDSRCIHELLRRVDSSNTPSSWPEFSENVTMYWNRHFTLPRNFGYSFSTDGVSVCLSMNRIVQKFNSKKAKKSEDALQNTTVSSVRNYSKVIAVDPGAKTPIVTCTRNGGDFSYKILKKERVVYESKECHRARKRLRFLKDIEDRIKSDRESTEQEIGLELTRKSQNAEPYTRFQLKWFDEKQRIYEQRRVQRLKFDKYINDQKMLHKIVDECFGKEPDTLVVYGAGFGFMNKGTFKSHRKFRHNDVIKIIKQRRNLSVYVINEAYTTKNCSYCHDRDRIQQKLSVSKSPHRYVYCSVCRKGIHRDKNGAKNILLKYENKLPISLSSVGTDMNLVDGRQPRVSTA

SEQ ID NO: 4801 - protein, 318 aa, Carpediemonas membranifera
MADVALSISTDGVSVAVTVWVGREKYRGGRVADRPTYKKGSSNKRARLGQDDAEATPAPDIQALMGFDPGARSLGGYTIRRPDGHSVSGVLAKCGYTATPSFRVNMSAASFKTTSLEALKQSIRFVHENIVQIINEGTRKCFRRATFANHCLRLKHFARAGRQLLDDLGGRPPEPIHLEVAYGAALFGSAGTPSCAPYRHFARALPGIMLRHNVVVSVTMVSEFRTFIVCPYCKAHFRRVVHTHRTMLCQNPACEGAPWRVERLRRHPEQSDILLNLSHRDKSASENILWCTLDATSDQIEQSPFHYDSQRGALPRYH

SEQ ID NO: 4802 - protein, 211 aa, Carpediemonas membranifera
MTPRLLLPRTFKLSWASTLVLGRWAATRSAAQTGRVSGVLAKCGYTATPSFRVNMSVASFKTTSLEALKQSIRFVHENIVQIINEGTRKCFRRATFANHCLRLKHFARAGRQLLDDLGGRPPEPIHLEVAYGAALFGSAGTPSCAPYRHFARALPGIMLRHNVVVSVTMVSEFRTSIVWPYCKAHFRRVVHTHRTMLCQNPACEGAPWRVE

SEQ ID NO: 4803 - protein, 231 aa, Carpediemonas membranifera
MTPASFKSTNLDSLQNSIRFVLLHEQEIFDAGMVKSFRRVRLTNHILRQKHFHRAGEQLARTLGWTPRRLPRSIAPPRAAPTRLVVFYGSARFKTPHRVHPCAPYGRFATLLPHIMRAFNITAEVRMTNEFRTSLVCPFCRARFRRTRYTRRTMRCHNPNCQGAPWYRQQRLNSDPTTSTWLNLSHRDKTAAQNILDCGLMTDAYNKPVLSEIQPVFPTITPIHQLRLTSR

SEQ ID NO: 4804 - protein, 406 aa, Carpediemonas membranifera
MSAAVTKLVTLTRAVNLELSQALPEPKLVPFVPMAPVRPGFMTIEYDYMSLTPAMKRRLRVHVNWSATKNLTDEQVAEYERDHGDITKLRRVLFVKTDGVSAAVTVWVGREKYRGGRVADRPTYKKGSSNKRARLGQDDAEATPAPDIQALMGFDPGARSLGGYTIRGPDGQSLSGVLAKCGYTATPSFRVNMSAASFKTTSLEALKQSIRFVHENIVQIINEGTRKCFRRATFANHCLRLKHFARAGRQLLDDLGGRPQEPIHLKVAYGAALFGSAGTPSCAPYRHFARALPGIMLRHNVVVTVAMVSEFRTSIVCPYCKAHFRRVTCGAHRTMLCQNPACEGAPWRDKRLSRHPEQRDMLLNLSHRDKSASENIHWCTFDATPDQIGLSPFHYGTQRGALPRYH

SEQ ID NO: 4805 - protein, 231 aa, Carpediemonas membranifera
MTAASFKSTRLVSINNSIRFVLDNANDIFEAGKRKSFRRVRFANHILRQKHFARCGQQLAREFGWLRHHPIATPIRLKVFYGSSGFTTPAGMFIPCAPYRKFAREIVSLLKGYNIVVDLNMVNEDRTTVVCPHCHAPYKRVRPRDDQHVHPHRVMLCENPQCRGAQWRATVPDALNVDHRDKSAAENILWRSLATEDELSGSPFSRTLIPRLPTSFQYHQLANRQHSSTDG

SEQ ID NO: 4806 - protein, 210 aa, Carpediemonas membranifera
MGFDPGARSIGGYYIRHPDGTTSSGVLPKCGYTKTPSFGFDMTAASFKSTRLVSINNSIRFVLDNANDIFEAGMRKSFRRVRFANHILRQKHFARCGQQLAREFGRHHPIATPIRLKVFYGSSGFTTPAGMFIPCAPYRKFAREIVPLLKGYNNVVDLNMVNEDRTTVVCPHCHAPYKRVRPRDDQHVHPHRVMLCESTVPWCSVARNSS

SEQ ID NO: 4807 - protein, 311 aa, Carpediemonas membranifera
MKRKARERLGVDDADARPAPDPDAHLMGFDPGARALGGFFIRHPDGTTSSGVVPKCGYTKTPSFAFDMTPASFKSTNLDSLQNSVRFVLLHEQEIFDAGMVKSFRRVRLTNHILRQKHFHRAGEQLARTLGWTPRRLPRSIAPPRAAPTRLVVFYGSARFKAPRRVHPCAPYGRFAILLPHIRRAFNITAEVRMTNEFRTTSLVCPFCRARFRRTRYTRRTMRCHNPNCQGAPWYRQQRLNSDPTTTTWLNLSHRDKTAAQNILDCGLMTDAQYQASAFRNPRPPARLPNYNPNTPITANQPLIFASGQAN

SEQ ID NO: 4808 - protein, 338 aa, Carpediemonas membranifera
MGRLLSLSTDGVCVAVTIKRGFGRYRPQHDASMPVRKRAKGREKERPRLGTNNAEAPPAPDPDAHLMGFDPGARSIGGYYIRHPDGTTSSGVLPKCGYTKTPSFGFDMTAASFKSTRLVSINNSIRFVLDNANDIFEAGMRKSFRRVRFANHILRQKHFARCGQQLAREFGWLRHHPIATPIRLKVFYGSSGFTTPAGMFIPCAPYRKFAREIVSLLKGYNIVVDLNMVNEDRTTVVCPHCHAPYKRVRPRDDQHVHPHRVMLCENPQCRGAQWRATVPDALNVDHRDKSAAENILWRSLATEDELSGSPFSRTLIPRLPTSFQYHQLANRQHSSTDG

SEQ ID NO: 4809 - protein, 338 aa, Carpediemonas membranifera
MGRLLSLSTDGVCVAVTIKRGFGRYRPQHDASMPVRKRARGREKERPRLGTNNAEAPPAPDPDAHLMGFDPGARSIGGYYIRHPDGTTSSGVLPKCGYTKTPSFGFDMTAASFKSTRLVSINNSIRFVLDNANDIFEAGMRKSFRRVRFANHILRQKHFARCGQQLAREFGWLRHHPIATPIRLKVFYGSSGFTTPAGMFIPCAPYRKFAREIVPLLKGYNIVVDLNMVNEDRTTVVCPHCHAPYKRVRPRDDQHVHPHRVMLCENRQCRGAQWRATVPDALNVDHRDKSAAENILWRSLATEDELSGSPFSCTSIPRLPTSFQYHQLANRQHSSTDG

SEQ ID NO: 4810 - protein, 304 aa, Carpediemonas membranifera
MPVRKRARGWEKERPRLGTNNAEAPPAPDPDAHLMGFDPGARSIGGYYIRHPDGTTSSGVLPKCGYTKTPSFGFDMTAASFKSTRLVSINNSIRFVLDNANDIFEAGMRKSFRRVRFANHILRQKHFARCGQQLAREFGRHHPIATPIRLKVFYGSSGFTTPAGMFIPCAPYRKFAREIVPLLKGYNIVVDLNMVNEDRTTVVCPHCHAPYKRVRPRDDQHVHPHRVMLCENPQCRGAQWRATVPDALNVDHRDKSAAENILWRSLATEDELSGSPFSRTLIPRLPTSFQYHQLANRQHSSTDG

SEQ ID NO: 4811 - protein, 275 aa, Carpediemonas membranifera
MTRMLAPRQTPMPTSWVRPGCSGSGWILHPPPRWHHLRCGPEVTNLDSLQNSVRFVLLHEQEIFDAGMVKSFRRVRLTNHILRQKHFHRAGEQLARTLGWTPRRLPRGIAPPRAAPTRLVVFYGSARFKTPRRVHPCAPHGRFATLLAHIMRAFNITAEVRMTNEFRTSLVCPFCRARFRRTRYTRRTMRCHNPNCQGAPWYRQQRLNSDPTTSTWLNLSHRDKTAAQNILDCGLMTDAQYQASAFRNPARLPNYNPNTPITANQPPVFASGQAN

SEQ ID NO: 4812 - protein, 482 aa, Carpediemonas membranifera
MEIYTIKASIKQAFRQNYTEERRVGDYAAAKYLYSCLLARLAVECYAQRRQLPLHDADFHKGLLTHLRGGHPGQAYAAIVQSLDTLPMWRETTTQDLVAQLEGRAESHGVSPSLRKWFIRYANSVKLWLARTVTTYRDRLQGTLARLEEALAGVGSPAFFEQELAGVHAILNMVNPEILACLPSLFWATHMGENDGLPVSQAAPRILSCVWAIADGVETLSGLISHFNGEYSMSLRQPRLVPIVPMAPVRPGFMAYGDTMGLLNDNFCHRVGINHALPHATKPLTEEQKRRYRDNPRSMGRLLSLSTDGLAREFGWRRHHPIATHIRLKVFYGSSGFTTPAGMFIPCAPYRKFAREIVPLLKRYNIVVDLNMVNEDRTTVVCPHCHAPYKRVRPRDDQHVHPHRVMLCENPQCRGAQWRATVPDALNVDHRDKSAAENILWRSLASEDELSGSPFSRTSIPRLQTSFQYHQLANRQHSSTDG

SEQ ID NO: 4813 - protein, 349 aa, Carpediemonas membranifera
MSAAVTKLVTLTRAVNLELSQALPEPKLIPFVPMAPVRPGFMTIERGVTALTPAMKRRLRVHVNWSATKNLTDEQVAEYERDHGDITKLRRVLSVKTDGVSAAVKVWVGREKYRGGRVADRPTYKKGSSNKRARLGQDDAEATPAPDIQALMGFDPGARSLGGYTIRRPDGQSVSGVLAKCGYTATPSFRVNMSAESFKTTSLEALKQSIRFVHENIVQIINEGTRKCFRRATFANHCLRLKHFARAGRQLLDDLGGRPPEPIHLEVANGAALFGSAGTPSCAPYRHFARALPGIMLRHNVVVSVTMVSEFRTSIVCPYCKAHFRRVVHTHRTMRCQNPACEGAPWRVE

SEQ ID NO: 4814 - protein, 552 aa, Carpediemonas membranifera
MRRSSRRSSALPREKSKAKAADRCRWIGDLAMWRDPDITPLVQDFVTAYSYLGLCKPFDTWLGEYSTATRVWLSRASPGYLTRLRAGLERVRPLLHDRPGVRQDFLDTLGELDTEVAAIAADHDRYHPQMHALPEGQRVGRTGTVAEALVGVLSCVTRMSAAVTKLVTLPRAVNLELSQALPELKLIPFVPMAPVRPGFMTIERGVTALTPAMKRRLRTTEQVDRYERDHGDITKLRRVLSVKTDGVSVAVTVWVGREKYRGGRVADRPTYKKGNNNKRARLGQDDAEALLPRTFKLSWASTLVLGRWAATRSAAQTGRVYLAYSLSVATLPPPSFRVNMSAASFKTTSLEALKQSIRFVHENIVQIINEGMRKCFRRASFANHCLRLKHFARAGRQLLDDLGGRPPEPIHLEVAYGAALFGSAGTPSCAPYRHFARALPGIMLRHNVVVTVTMVSEFRTSIVCPYCKTHFRRVVHTHRTMLCQNPACEGAPWRVERLRRHPEQRDILLNLSHRDKSASENILWCTYDATSDQIEQSPFHYDSQRGALPRYH

SEQ ID NO: 4815 - protein, 385 aa, Carpediemonas membranifera
MAPVRPGFMHVPCSLNVLNPAWLAQLGVDPEHHATERMTRELLEALPPNIRRVLSVKTDGVAVDLTVQVGALSYVSRRASGNPTMKRKDRERLGVDDADARPAPDPDAHLMGFDPGARALGGFFIRHPDGTTSSGVVPKCGYTKTPSFAFDMTPASFKSTNLDSLQNSIRFVLLHEQEIFDAGMVKSFRRMRLMNHILRQKHFHRAGEQLARTLGWTPRRLPRGIAPPRAAPTRLVVFYGSARFKTPRRVHPCAPYGRFATLLPHIMRAFNITAEVRMTNEFRTSLVCTFCRARFRRTRYTRRTMRCHNPNCQGAPWYRQQRLNSDPTTTTWLNLSHRDKTAAQNIVDCGLMTDAQYQAVLSEIQDLQPVFPTITPIHQLRLTSR

SEQ ID NO: 4816 - protein, 639 aa, Pythium oligandrum
MESWHLVNLHTLRCLEEGIQLPSYDATFFDLCCAGVSSTTHSHTIEGKNPALWKTIQIYRAGRSTTSLKEIEHQTGLPRMKQELRQQMVVNAEVMLREHFRRRLRAYVKVNYPKANANDVVRGCYHTEPTQLAEVREMRALLTPDGVSWCEEWIPWPDRITDKTKIEFYIRLLWKFQRVADDHIDTNPGKSIKGVRAFSLFPVATSYTASHIKINSATLAGLCSRVKKKDPETGDDCSITKWWGVDHIKIDPNAFGQEKWTVMRKAFDIDEFETLRPDTNVTKEAFRRMPVEEKYAHASHLFANQVTTDGYGASVLLFRPKNELDEAEKQLGRLVPEEYRPDVVIGLDPGMRSVCTAVREDLTQHKRVRRRSVRKKQQRKKSWIRRYGGPRHKNGRDIIEVHAKEYRHLAGFRKRRAWEEGLRKSNPEYEKVIIAMPSFKTSRYKVYLERLQYFWSHADFLLDFCWEKPFLKWKFFNKRHARIAVDALAARIVPDPSRQTCIAYGNWSRRDGIKGHASSPVKGLKQALAKRAKVVILDEFKTSKLCSTCHCELSPVSYLVEPDLDKRRKRRGRVISRSHSSERKETKCHAVLQCEEKKCESSYWNRDVNAAINIVNLLKYEIRHSTRIPAFARAQDRSS

SEQ ID NO: 4817 - protein, 481 aa, Dreissena polymorpha
MKRKREHFTLWDAANVHKHKSMWYWWAYIRRKDMVNHEKTDCDVIQLLQSASVKKQKTHSDDFLTSFSVGIRPTKHQKQVLNEMLRVSNYTYNWCLWLVNEKGLKPHLFELQKVVCKTNASDVDPYYRMENDNWFFNNKMSTIKLTSCKNFCTSYKSAKSLKSKLKRPMSVSNIIQGSFCVQKLFIRRLSDKDVSIDNTQMQNRYICMMPDNFEKRSNPKERFLKLAKPITKIPPIDHDVKIVKRADGMFIMNIPCDPKYTRRNASNDTIEKRVCGIDPGGRTFATVYDPIDCCVFQVGIKEDKQYVISKLHNKIDHAHMHLTKAQNKKQQQAARERIVSLKKTHLKLKTFVDDIHLKLSSHLVKEYQYVALGKINVAQLVKTDRPKPLSPRAKRDLLYWQHYRFRQRLTHRTTNTECILDVQNEAYTSKTCGVCGTINKNLEKSETFYCDNCKYNTHRDVNGARNILLKSLRMFPFVNSQ

SEQ ID NO: 4818 - protein, 283 aa, Sitodiplosis mosellana
MLDNPDFRPIIRNLVVVPMCSFRRTHFRIDCTSMNQVLSPQKLLPKVETENKNGETSIKIIGQQDFNHSRDYWWNHYFYMRKIRRFVRGKNQFDFSINTDGIAVSLQAKKKTDNKEIDQKSHIIQKIKDGTIKNYSGVDSGVRSWNTTTTHDIETGKEIKLVYSTKQFHWQTGQKVRNAKEKRWTKKFVEMERADRENRELYPVMPSPKGSHWLNYIKHRVKMMKHGICAYSTAKYTRLALDKHIKSSSVVDKWVNKVTDKQPTVFLFGADGEIPPESSISSR

SEQ ID NO: 4819 - protein, 368 aa, Begonia darthvaderiana
MKTLKLRIRDKHINQLNRLSGSVNFVWNYVNALSYEHLKRTGKFFSAYDLNDYTKGSGELLGLHSQTIQAINETHAKARKQFKKAKLSWRTNNPTSKRKSLGWLPFKQSAIKHIATHQTGKKGLKSTLQLSLAKGQKLVIDLWDSYNLSLYQINTLEIVQDSRNRWYACITVKDYPKTQCGTGSVGIDLGLKDSATTSNGNKLQIKQTLNYAKDLAIAQRAKNKQRVKAIHAKIKHTRQDLIHKFTTQLVKDNALIVVGDIQSNQFNSKKGKLAKSVYDAGWFELKRQLTYKCKHAGCRFEIVNERYTTQRCSCCGEITANSPKGRKSLGIREWICASCGTWHDRDINASKNILAVGLDRLVEGIPLL

SEQ ID NO: 4820 - protein, 368 aa, Begonia darthvaderiana
MKTLKLRIRDKHTAKLNRLSGLVNFVWNYVNALSYEHLKRTGKFFSAYDLNEYTKGSGELVGLHSQTIQAINETHAKARKQFKKAKLSWRTNNPNSKRKSLGWLPFKQSAIKHIATHQTGKKGLKSTLQLSLAKGQKLVIDLWDSYNLSLYQINTCELVQDARSHWYACITVKDYPKTQCGTGSVGIDLGLKDSATASNGNKLQIKQTLKYAKALATAQRAKNKQRVKAIHAKIKNTRQDLIHKFTTQLVKDNALIVVGDVRTTQFNSKKGKLAKSVYDAGWFELKRQLTYKCENAGCRFEIVNEKYTTQRCSCCGDITDNSPKGRKSLGIREWICASCGTWHDRDINASKNILAVGLDRLVEGIPLL

SEQ ID NO: 4821 - protein, 372 aa, Begonia darthvaderiana
MKHCAYKFRFYPTDEQTKLLAQTFGCVRFVYNTILRWRTDEYYQSKAKIGYIQANAKLTELKKQPEFSFLNDVSSVALQQGIRHQQTAFKNFFEGRTKYPTFKKKTHKQSAEFTKSAFKFTDGKIYIAKSKEPLNVRWSRQLPSEPSTITISKDCAGRYFVSCLCEFENQILPKSDSNIGIDVGIKHLFVTDSGIKIDNPRLTAKYATKLAKAQRALSRKKLGSANRAKAKLKVARIHAKISDCRLDNLHKLSRKLINENQVICVESLRVKNMIKNPKLAKHIADASWGNFVNQLEYKADWAGRTISKIDQFFPSSKRCSNCGYILNFLTLDTRYWDCPECKTTHDRDVNAAKNILTAGLAGLAFGENVSLV

SEQ ID NO: 4822 - protein, 368 aa, Begonia darthvaderiana
MKTLKLRIRDKHTAKLNRLSGSVNFVWNYVNDLSYKHLQKTGKFFSAYDLNEYTKGSGELLGLHSQTIQAINETHAKARKQFKKAKLSWRTNNPNSKRKSLGWLPFKQSAIKHIATHQTGKKGLKSTLQLSLAKGQKLVIDLWDSYNLSLYQINTCELVQDSRNRWYACITVKDYPKTQCGTGSVGIDLGLKDSATASNGNKLQIKQTLKYAKALAIAQRAKNKQRIKAIHAKIKNTRQDLIHKFTTQLVKDNALIVVGDVKTTQFNSKKSKLAKSVYDAGWFELKRQLTYKCENAGCRFEIVNERYTTQRCSCCGEITANSPKGRKSLGIREWICASCGTWHDRDINASKNILAVGLDRLVEGIPLL

SEQ ID NO: 4823 - protein, 383 aa, Begonia darthvaderiana
MKTLKLRIRDKHTDKLNRLSGSVNFVWNYVNALSYEHLKRTGKFFSAYDLNEYTKGSGELLGLHSQTIQAINETHAKARKQFKKAKLSWRTNNPNSKRKSLGWLPFKQSAIKHIATHQTGKKGLKSTLQLSLAKGQKLVIDLWDSYNLSLYQINTLEIVQDSRNRWYACITVKDYPKQSCGTGSVGIDLGLKDSATASNGDKLTIKQTLKYAKQLAIAQRSNNKKRIKAIHAKIKNTRQDLIHKFTTQLVKDNALIVVGDIQSNQFNSKKGKLAKSVYDAGWFELKRQLTYKCENAGCRFEIVNERYTTQRCSCCGEITANSPKGRKSLGIREWICASCGTWHDRDINASRNILAVGLDRLTLLVRSVESLHTRKNRDLPVKA

SEQ ID NO: 4824 - protein, 384 aa, Begonia darthvaderiana
MIKGHTIELTPNNKQATYFAKACGVARLAYNWALAEWQNQYQADKVYRDNCQKNGIAIDRTKLNNPSQFKLRKQLNFIKKTKFPFMFDVTKCSPQEAIIQLGKAFDNFFKGRAKYPQFRKKGINDKFSLTNDQFKIIGKNIKIPNLGWVKLTENLRFNGKIMNATIFKKGMKWFVSIGVEINETPKPLPRTDKAIGIDLGITDLAVLSNGTKVQAPKPLKSKLKQLRRLSKQLSRKQKGSKNREKAKTKLSRLHYKISCIRKDFIHKLTTKLVKMYDVICIENLNVKGMVKNRKLSRAISDLSFYEFKRQLIYKANQSRKTIKEVDRFYPSSKTCSHCGFVMAKIDLTLAIRNWQCPSCDTQHDRDINASLNILNQADRVLTLS

SEQ ID NO: 4825 - protein, 352 aa, Clogmia albipunctata
MKTLKLRIKDKHCKALDQLATEVNFVWNFVNDLCFKHLQRTQQFFSAYDIAKYTKGTSKECNLHSQTIQAITEELITRRKQFKKAKLKWRVSHKKSARRSLGWIPFKKVAIKYADGYVQYGKHQFRLWDSYELSKYNVKTGSFVEDARGRWYVCLVVEAIPTIKSEAKTSIGIDLGLKDLATCSDGIKLKAPKIYREYEQKLGIAQRAKNNKRVKAIHAKIKNIRQNMLHQFSRKLVNEHAAIFVGNVNAKALAQTKLAKSVLDASWTTLRTMLKYKCENAGVWFEEVNEAYTTQTCSCCSSRLSSPKGRMGLGIREWQCMECGTLHDRDINSAMNILALGHERLAGGITLF

SEQ ID NO: 4826 - protein, 397 aa, Papaver nudicaule
MQRFQAFKFELMPTGEQQRSMRCFAGACRFVFNKALALQKQHYEQGEKKLGYAGLCKALTVWRNGVETPWLADAPVHPLQQSLKDLERAYASFFAKRTDFPRFKRKGRSDSFRYPDPKQIKLDPSNSRICLPKLGWLRYRNSRKVLGEVKQVTVSASGGKWFVSIQTEREVEQVVPQGGAVGIDMGIARFATLSDGTFYAPLNSFKRHEDALRKAQQAMVRKTKFSTNWKKAKARVQRIHFRIGNARRDFLHKATTAISQNHAMVCIEDLRVRTMTKSAAGTTRHVRAKSVLNKSILDQGWFEFRRQLGYKLAWGGGCLIAVPAQNTSRTCPCCGYVSSDNRKTQARFACVVCGFEENADRVGAINVLRAGHARCACEVSDGVGRQQQEPTEATCSG

SEQ ID NO: 4827 - protein, 415 aa, Odontarrhena argentea
MNDTQLLAYRKKLKKEKLKPKEEQKEITCNLFSEPNFEKPYVDYNFLDALFKAMIQNDYRALPTQCSQSIMKGLFQNWKSFFASLKDYKKNPNKYAGTPRIPKYIRSSEKEILYTNQDCIIKNGRFLKFPKTKLQLNIGKLGFTEGKLKQVRVIPKYNEYVVELVIDVPSEQQMIEENARYMSIDLGIDNLATIVTNTGMKPVLVKGKHVKSINQYYNKMKSHFTSILRNGKQTNEGPFTSKRIEKLHQKRYLKIKDVFHKVSHHIVKLAQEEEVCKIVIGQNKSWKQETNMGKRNNQSFCHIPHNLLIQMITYKANAVGIQVVVTEESYTSKASFLDNDFIPTYGENDQNTTFSGKRIERGIYRSANKTLINADVNAAANILRKVIPNAWTNGIEGLGVKQLANVLTPLTLIVR

SEQ ID NO: 4828 - protein, 368 aa, Raparia bulbosa
MEVNQIMMNKAYKFRIYPNQAQAILINKTIGCSRFVFNHFLSLWNHAYKETGKGLTYGICSAKLPAMKKELVWLKEVDSIAIQSSVRNLADAYTRFKSKKNNVQSYTTKQTNENIAVVGNKIKLPKLGLVRFAKSHEVEGRIVNATVRQNPSGRYFVSLLVETEVQKLPKTHSYIGIDVGLKDFAILSDGTHYENPKFFRSLEDKLAKAQRVLSRRMKGSSRWNKQRVKVARIHEYISNTRKDYLDKISTEIIKNHDVIGIEDLQVSNMLKNYKLAKAISEVSWLQFRSMLEYKAKWYGKQVIVVSKTFASSQLCSCCGYQNKDVKNLNLREWDCPSCRTHHDRDINASINLKNEAIRLLTARTAGLA

SEQ ID NO: 4829 - protein, 422 aa, Tilletia controversa
MADPPPAPWIGSVAPESVLWPGVEGTQQAAEWHNAPSNTWFLPKYAHLPHPVVPDEDIGGMLTELSATLRQRLDAVPPPPPPRRARPGERQDNSRLKTYRTRLRPNTQQKEALRKTAGIFRWTYNRAVAYLKAHPNASLNDVREHSVTEDGLPLMNLSWVTPVPYSIREQACLEAHTALRNGLADVRDGKIPHFELKFRKKRALFSSFRIRTRDWVGGCLKISNFGLGPGQHQTKIQTGIDVPSLEHDGACIKQENGSWFLLWQKDKGEEKMRVPAARGPEMCAIDPGVRTFATIYDPLRGMAAKFGDGDHKRLFRLGTHLDQLISRSTQASAKKRYRMRRAANRLRARIRHLVDELHWKLRGYLKQNFDTVLLPTFNAHQMSRRAQRRIGRKTVRAMMSLCEACSYASHRSGRRQNTEGRL

SEQ ID NO: 4830 - protein, 415 aa, Tilletia controversa
MADAPPAPWIGSVAPESVLWPGVEGTQQAAEWHNAPINTWFLPRYAFLPRPVVPDEDIGGMLTELSATLRQRLDAVPPPPPPRRTRPGERQNNSRLKTYRTRLRPNTQQKEALRKTAGIFRWTYNRAVAYLKAHPNASLKDVREHSVTEDGLPLMNLSWVTPVPYSIREQACLEAHTALRNGLADVRDGKIPHFELKFRKKRALFSSFRIRKRDWVGGCLKIPNFGLGPGQHQTKIQTGIDVPSLEHDGACIKQENGSWVLLWQKDMGEEKMRVPAARGPEMCAIDPGVRTFATIYDPSRGMAAKFGDGDHKRLFRLGTHLDQLISRSTQASAKKRYRMRRAANRLRARIRHLVDELHWKLRGYLKQNFDTVLLPTFNAHQMSRRGQRRIGRKTVRAMMSCEATSCACHGNWVRR

SEQ ID NO: 4831 - protein, 421 aa, Tilletia controversa
MADPPPAPWIGSVAPESVLWPGVEGTQQAAEWHNAPINTWFLPKYAFLPHPVVPDEDIGGMLTQLSATLRQRLDAVPPPPPSRRTRPGERQNNSRLKTYRTRLRPNTQQKEALRKTAGIFRWTYNRAVAYLKAHPNASLNDVREHSVTEDGLPLMNLSWVTPVPYSIREQACLEARTALQNGLADVRDGKIPNFELKFRKKRALFSSFRIRTRDWVGGCLKIPNFGLGPGQHQTRIQTGIEVPSLEHDGACIKQENGSWFLLWQKDMGEAKMRVPAARGPEMCAIDPGVRTFATIYDPLRGMAAKFGDGDHKRLFRLGTHLDQLISRSTQASAKKRYRMRRAANRLRARIRHLVDELHWKLRGYLKQNFDTVLLPTFNAHQMSRRGQRRIGSKTVRAMMTPSGVLQSAFPLRLCRQPKACA

SEQ ID NO: 4832 - protein, 398 aa, Craniophora ligustri
MDKSEVHSSTYEAYYNGMCKSNRIGEWFTENKINSKELKKDFWKFIPLFLRIQHELYENNKPSFNVFPIYSHGLKFITYDSRCIHELLKRVDPNNTPSNWSVFSENTTIYWNRHFTLPRKFGYSFATDGVSVCLSMNRIIKKGQKFKSKKVKRSEESIENTAVGNKRNYSKVIAVDPGAKTPIVTCTRNGDEFSYKVLKKERVVYESKECHIVRKRLRFIKDIEKRIRVDRESFEKETGIELTRKSKNVEIYTRFQLKWFDGKQKLYEQRRFQRLKLDKYINDKKMLHKIVDEYFGKEPDTLVVYGAGFDFMNKGTFKGHRKFRHNDILKIIKQRKNVLLYIINEAFTTKNCSKCYEKKIQQKLHVSKSQHRYVYCSVCRKGIHRDKNGAKNILLKFE

SEQ ID NO: 4833 - protein, 557 aa, Autographa pulchrina
MSISCKTCGGLDHTRKSSKKCKEYLPPIRKRTFDPGVELEVYTIKRGLSSIICPLLEQEKRLKLLSEIRRDVRDLSRVYIELGVWINYYLKTSPVLPSKPDVLNFLYAMKGKGPYSESYRTMFGDRKYNDKLRSFVVQEMAKQYETTIHTNIKTHAYARLARYFNVKRNNPELFNAFFKKILPENHEEMTRICSLINVDTLKSKWWATIPEWLRIQEQLQDFRLFPQPSHGLKHITYTSRGWHELLRRVDPSSITSIWARIENHMQELWSLWLEVDTKRFGCCLQTDGVSVSLSMNRLINKNKTCLSLEKRKKPSYDRIIAVDPGSRLPVAAVESTRGQFKRITRKYVRSHTLEWKRERIRTKLCSTSERAEQRAREQFNFPVSSKYTSHVIEYTVFRLTWFNVRQEPYELHSKLTRLRLDKYIRTAICEERIIKEVFDAGGIEKKKILYGAGSKFMNKATFSGRKFKHDSLIRRLRSKRNIDVEIVDEQYTSQACSACNEKMGAFHKIVMNHRLRWGVCPNCRNEFDRDANAARNILINYTRSTICRPGCSTNGAS

SEQ ID NO: 4834 - protein, 309 aa, Griposia aprilina
MCKSNRIGEWFTENKINSKELKKNFWKFIPLLLRIQYEFNEMKKTSFNIFPIYSHGLKFITYYSRCIHELLRRVDQKNTPSVWSVFSENTTMYWNRHFTLPRKFGYSFSTDGVSVCLSMNRIVQKDQKFKSKKVKKCEESLENTAVGSKRNYSKVIAVDPGAKTPIVTCTRNGDDLTYKVLKKERVMYESKECHRVRKRLRFIKDIEDRIRVDRESVEQETGVELTRKSKNAEIYTKFQLKWFEEKQKIYEQRRLQRLKFDKFMNDQKMLNKLVDEYFGNEPDTLVVYGAGFDFMNKGTFKRHRKFRHN

SEQ ID NO: 4835 - protein, 305 aa, Chlamydomonas reinhardtii
MARLLGLPSPHCSDGGSGGGDGNSGDGSGSSGGSSDSSDGVGGGRNGGGGARGAGGGRARGRRLWQQARLEEQPALKRCQAGIPSARVASAAEHELRIRHLYSGGGVDAAAAAGSAPAPVQQYGLWHLLRFYRQWGQRRWRLTVHVRTQKVLEHTAQQLAGGRPKEEVIVGWGNANTGYGGCISRLGRRGPNRALLRLLVDKYAHLVVYVDEFYTSQGRDVNSATSIQHALVEMLLGHKRPASLQTGGGGSGSGSGSGGGGGGGGGGGGSSSGGACAHLGSGGDGKGHMEEESAAPPKKRRKRAG

SEQ ID NO: 4836 - protein, 234 aa, Chlamydomonas reinhardtii
MAAAAAAAAATAATASAGAETEVAAQGGREVEGQETGRRLWLQARLKEQPALKRCQAGIPSARVASAADHERRIRYLYSGGGVDAAAAAGSAPAPVQQYGLWHLLRFYRQWSQRRWRLTVHVRTQKVLEHTAQQLAGGRPKEEVIVGWGNANTGYGGCISRLGRGPNRALLRLLVDKYAHLVVYVDEFYTSQVCAKCGRRLLGNGQRCLQAVVPWGGLRAHQVQVCNHCGTVWV

SEQ ID NO: 4837 - protein, 369 aa, Chlamydomonas reinhardtii
MAAAAAAAAATAATASAGAETERRGWRGTRQHTHQRAATERRRQQRACFTRLSGAGYRHCTGQTGRRLWLQARLKEQPALKRCQAGIPSARVASAADHERRIRYLYSGGGVDAAAAAGSAPAPVQQYGLWHLLRFYRQWSQRRWRLTVHVRTQKVLEHTAQQLAGGRPKEEVIVGWGNANTGYGGCISRLGRGPNRALLRLLVDKYAHLVVYVDEFYTSQVCAKCGRRLLGNGQRCLQAVVPWGGLRAHQVQVCNHCGTVWGRDVNSATNIRHALVEMLLGHKRPASLQTGGGGGGGGGGGGGGSGGGGGSGGGNSGGGGSGGGGSGSGGGACAHLGSGGAGKATWRRRAQRSRRSGASAQAEEPAGGV

SEQ ID NO: 4838 - protein, 225 aa, Chlamydomonas reinhardtii
MPTKRSKGGGEAPQEHPWQAAGQEAGQAAGQEAGQAAGQAEAAGPAEAGSRGAVHVLWHYHFSAFRRKRWAAFIQRDRALHRVAKQLTGGRPKEEVVVGWGSWAFQGGKGGSPISVRGGRAPTGRLIKLLRERYAKHVFIIDEYKTSKTCYNCGCQEMAIKRLGGLKEGQRPWSVKVCNDCLTTWNRDVSAANVIRVLLLLKLMGFERPTKLQRPPWPPPAAGPG

SEQ ID NO: 4839 - protein, 222 aa, Chlamydomonas reinhardtii
MNAKTSCCQPWWPAPCSTEPCGPWTSWSGRGPNRALLRLLVDKYAHLVVYVDEYYTSQVCAKCGRRLLGNGQRCLEVVIPFGGSRARDVQVCQHCGTVWGRDANSATNMRHALMEMLLGKPRPAALRPAGGGGGAGPGGGGGGGGGGGGGAGPGDGGGGGGGTAPTGGNSSGHGVGPGGGGGTGGPGPSGSGGAHVRSRGGGQGHVEEDSAAPPSKRRRRAG

SEQ ID NO: 4840 - protein, 202 aa, Cyanidioschyzon merolae
MSEVTSRGAGFQAFLKFMKVRVAHWEALWEEYTKPRWARLRMNLYCGKQRAFANFFNQLSALKVDVSQRLVVAYGAGRWKTQKGCTPAPTTRAHKECARRFVTIPVDEFRTSYTHHELDCTLQRVEMEKCQRSPEDIIKYGPLTEEQMERRAKVRRLLALVSTTNHGKKRMEFVNRDFDAAINIRKCAVLETRAPEWTRENF

SEQ ID NO: 4841 - protein, 203 aa, Cyanidioschyzon merolae
MSEVTSRGAGFQAFLKFMKVRVAHWEALWEEYTKPRWARLRMNLYCGKQRAFANFFNQLNALKEDESQRLVVAYGAGRWKTQKGCTPAPTTRAHKECARRFVTIPVDEFRTSYTHHELGCTLQRVEMEKCQRSPEDIIKYGPLTEEQMERRAKVRGLLALVSTPSDGKKRMEFVNRDFDAAINIRRCAVLETRPPEWTRENFV

SEQ ID NO: 4842 - protein, 400 aa, Spizellomyces punctatus
MSFFPAYCKLSGLYERHGFRRFSAIPLRRSLIQSHVRIDTVILYTHILCIFRREAEAVEKDDLWLRVCNLRTKAFRSRRGGGMQFEGSITTDGTSVSVYLKHPDADKYGKRGGKKKSAKTLAAEVKAVYVEKNLPACRAAENVVVIDPNKRDVLYCQDNKGTIFRYTANQRCKETGSRRQQKERQWMKKEAGMDLIESRIPSHKTMNLMDFLRYLLVRRVDWNRRKDFYSHPAHTRWKWHSFINRQKSESDLISNMRNKYGENLTVVMGDWSDAGRTARFQTSSKTKGWRTLFKRNRIDCFLLDEYKTSSVCPRCSSSEFVEKKFKERPHSRPYRRREGKIEKVHGLLGCTNPNCLQQAWTMRYWNRDTLSTCNMLTIVQSMLDGHGRPEVFSRGVPAVA

SEQ ID NO: 4843 - protein, 568 aa, Spizellomyces punctatus
MVAAFSPLTHPDMGCPTCNGTDHHRASSKLCSFYKPRKKNEVRTTLKRKRDTDLPNDEIFILSTVVKSGQRSPLQVVIAHAARTLTCIAAEATRLFNMFVLDLLERKQQIPECSYNKFLHQPFQIIALAKASSPQLQTIHRTLYRQTSRYDVTYLSQLISNMAKDYETNCMNHVSTNIRKWAFKWYRMKMQKTYPDLKRDKIRILFNKEDDLNEHSLYLKACLMTYDVDITKEVSFDHWWTYFPLMWKFQRYFAKHGERNFSMVPITTYGIRHIRLDTNALYKLCLRVDLFTRKDVPAAEFRTNALVYWKTLFPDIAETSNKSFAYGVSTDGVACSYYYQKRYVRRRQSHNYYGFDDDGKYGAMNLEDGVSIVGVDPGRIDIFTAVDGNENVVRMSRKEFYSLTGMVASQKTRNRWLKNNPAVQSIVTQCPTPRTPDIENFRQHCQYVQQHLLTLVDFYGARRFTRQKLHTYIGKQKVWATIVRRITKNDRRTVVALGDAKFRHNSKGGPSTPLARMAKELKRRHRVRMIDEFRTSITCSHCDGELPKSTRHWQVKVRWAVMNSVSQK

SEQ ID NO: 4844 - protein, 232 aa, Phytophthora parasitica
MCCGILIPVDVICLWRRTNSVKRSSIKTLTTRRATRKRMSGKRIVPTFLEAVRNMPTKKTASLEQLEAYVKFMTPRMDLLLEFPMHEPFCKLRFRRYILAKKKLRQLCQRLIAQAGRRKIVGFGDWSNTDVSGLIKECPAGPVNPFQRELKKHCRVESIDEFRTSKLHSVCHCEMKNRYSKRLCKKDGVERTLKVHSVLHCTNNGCHGMTVNRDENTLKNMLMLLIECKLRR

SEQ ID NO: 4845 - protein, 343 aa, Phytophthora parasitica
MYPEGMEPPPQWAFETPKNFRFNALRKFESGVMSAFSNLENGNISKFKIQFKSRKKDGRYFTFCEDAGNAKITYMDGAPRAMLSISKLKDIPIRCDRSIEIANEIQIMNTNGFWYAIIPQYVRPGDYVNRGRTIALDPGMKAFMTGVDLEGNALHIGRGNKEHLDKYRARIQNAQQEMSTIKNFQGHRSGRQWRAFARAKRAFHCATAKLNNCVKEMHYQTSAYLTKHYDTIILPVFNSKDMVKKSSARNHTFNRLLLGLKHFQFRKLLQAKCELMGKSLVVCSEMYSSQTCGRCSKLHLRLGSRDVFSCPRCEHVAGRDVNAAFNVLRFVCAGSLSVSAIHH

SEQ ID NO: 4846 - protein, 472 aa, Phytophthora parasitica
MGERPEWWRASVGHRAGEVWLPSAQDNRARVLTKGIKQKSWFQLNNVVEKESRPSFQPSSEASTPSETPNSVIKIRLYPTKSQKTLLNKMFGTHRANYNKLVETSREDCYKLKLSELSQKYRPISQKHSLANYLPEYHLEVPEEVMDSTYRDFTKALKSSRALFKALKKKDKKTSFPELRFKSKKDNSSSIEFRNRGIKSANGLVQFKPRYFGFSKNEGFLIKEKMPDLQFSVRLLRTRDEKFYLCIPRVKVFKQTTSTRTCAIDPGVRSFITMYDQDGLTLGVDDANEYIFRRCLTIDRLISRRTRETNKRKRYRMGKRLTKMFNRVKAMIADMHHKVSSWLSKNYKQVLLPSFQTSDMTSRQKRISSKTSRAILTWSHYKFKMMLAYKMERSGGRMIECEEHYTTKTCSCCGRINYGITSQKVFDCNHCNLVIDRDVNAARNIFLKNEELLTWVPAQVPGDAYSEVVRCA

SEQ ID NO: 4847 - protein, 370 aa, Phytophthora parasitica
MSAKDKLMIRRIRKYRLFPTAEQRKKLHQFMGTCRWTYNKGVAHFRKTNVSSAQTLRDLYVTEKSKKQRVYPEDMEPPPQWAYETPKTFRFNALRKFESGVKSAFSNKINGNISKFKIQFKSRKKDGRYFTFCEDAGRANIMYKTGESRAMLSISKLKNIPIKCDPGIEITNEIQITNTNGFWYAVIPQYVRPGEFDNRGKTIALDPGMKAFMTGVDLDGNALHIGRGNKEHLDKYRARIRNAQQEMASIKNFKGHRSGRQWRALARAKRAFHCATAKLSNCVKEMHYQTSTYLTKHYDTIILPVFNSSVMVKKSNARNHTFNRLLSGLKHFQFRKLLQAKCELMGKSLVVCSEMYSSQTCGRCARLHLX

SEQ ID NO: 4848 - protein, 208 aa, Phytophthora parasitica
MIRWFAFGRPTSIEQTNTLNTPTKKTSSVETFCNSIEFWFQHGHELLSFFMDPFFRKLKFRRCTLRTAQLDRACFALAGARRTKAVVGFRDCGMAGEGLIKRSVAGPVKACTCKLARYCEVVVVDEFRTSKKHFDCQTTDDLTNQRVMRKCRDGVVRKVPVHKVLHCLRKHGGCGKSVDRDVNAAKNILSILQNQLAGISEQPLRLRR

SEQ ID NO: 4849 - protein, 250 aa, Phytophthora parasitica
MINKMATTMAVNSANMLALHFRRRLHQYVRFRYAKEGKIQLSYNKTKKLVDSCYRVHEVQAFDTNGNPTATTTMWGAWDKWRTLEQRELREWLAEYYHLAKLNKKRVWDLNLRKTEPAYALILKEMPSFKTSQLTTFMDRLQYFVEHVGFLVSFSAKTSFRKWRFLTTSSKMQALTAIARRLVPIRSAQVCIAFGDWSCQDGLRGNPRAPVQALKKELERRATVLPVDKFRTSKLCSGCHKRLLSARLLX

SEQ ID NO: 4850 - protein, 512 aa, Rhizopus microsporus
MSDNNSSNCCKELPVASRKALAYFIYKQKQGPEPSWPSPVPCSNFYKEITGSIASMWSKYQPDQFFIMENIPSKVTSKAYVYRKLRELPFTGALSKKKFNSLREETLQSINSNKTFVPGKKLAKLTPQQVSVVQHFIDTVKTRIQDSTFTPSKYTDKRGCRFFPLRLYIPKPTDFYYHLFNFTKLGFCTRDSLTSGKKFRNVITTDDHSISFPFTRTVKRSLTTTRSPSDFTNDIQNGCDIWGVDPGVSTTLTAVDTPRRQRTTSLDEYYHLYGYNDANFIRKKHQEQHTAQFLKISNLSSLKTSNITDLYDDITSYYNENAWSSKLKFQCYIRKQKGVHEICKGLMHGSVKYNKKASTGIKTSSAEYKSKYCPPAPLDHPDKPRKTIIAFGDGMFNSSLRGNRGASVRLIKKTLQKYCENQLEICMVDEYLTSQICNRCKNRNMDNVVTEKSKRRVHTILKCKQNTCNIVWNRDIMAAHNILDIFLFALRNNNQRLDVFIRQGTSNGQPSV

SEQ ID NO: 4851 - protein, 366 aa, Rhizopus microsporus
MCEILQGKSLNCFLLKRAFILPYVAIGTLILSTQILKNPITSHLDKEIIWVSVLNVAAKAMKPQNERKTMKLRGMLFTEGVGVSVLKQNDNMKKGGSGTGRRTKAVDEEDFKYVEKLEKEVLLAGIGKCVLTDPGRRDMLYCMHEESTIENRRTYRYTSNQRIIETKTRKFKKLRENLKPDNVRAVEVSLSNCKSSTVNVGKFAKYLQKRATVTPVLSKYYANEDIPAVDANLLPFRKMKPPSFINGQQADKRLTRNLITKLGDDATLIIGNWSTGNVKFHEPIRGTGMRRMLAKQGFKICLLDECKISSLFPSCLSGKLEKFKKVQNSRPFQREKQPTVTCHGTLRCKNQQCLEDTTGTISRRHI

SEQ ID NO: 4852 - protein, 528 aa, Rhizopus microsporus
MFLNGICKKKEESNCLRKKMTEERYADYIIQETIKRTLILPCMKVKLAVAKKQIPNDEILNADAKDQIKEFFSMYSTEYNFQKASIYYDVKANLGKHFKAFHKLLNYAKQIKLKTINAILYEALNYYILKYKNKKERKLTIWSKVINLEKKGMKNQGIGKTLQFEGTIETDEICASIIKQNFDTSRKRPGTDNSRSQKPKKTTIGDNNNVKHIKILTRTEPLSTNGRCVLIDPNHRDLLYCMKETSSAENKQILRFTSICRSKHSRRFRILRKKAKPEEVRLAEEMLSKTRSSAMNANIFLEHSKASSAFEDVLSNYDSHETKGPKGIYYPDLRNDFEFKKCNLYWGNLFGARFPAIFSKSIAIQDNNTKLQTYAINIQIISLLQTLQLLPFRKMRFSSKLLLQQNNDKLIKSLKKKFGHDAVLGLIQMLKKSGFYLYLINEYKISSLCPDCKGKLEKIKIIDNPRPYGRKDMSKVKCNGLLRKILMSFRETREHPSCFRQIQPLPKPSYKRRQGEGPSSNKRTKLSA

SEQ ID NO: 4853 - protein, 470 aa, Rhizopus microsporus
MNFEGTLDTDGVGVSLLKQNFSPDRRGTLNVEGKPLKADNDEFRYLESLSKKELDNTLKKCVLIDPGRHDLLFCMHEDSSIEEKKLFRFTRNQKLVETKARRFNKLRKFMKPAYIQELEASLSKIPAATVDLVKYTKYIKRRSKVSQPLKRYYSSEGEFLDRNIGYVYEDSDEDDPAIGIDDTAAATDNICPKPAFECKKSKNKLGTYLSNLRYIHQENNTQIQLAEDDITQLNTVIQQTDEILQKPETTEEGFESQISIVKNLLEETKAKLPTLKFRKMKLQSTINRQQSEKRLVNALKAKFGEDAVLVLGNWSASHVKFHEPTKGKGMRKMLRNEGFEVLLIDEFNTSSICPECNSDLKKFKTIENPRPYRRSKMLEVICHGLLKCVNKDCLKIEGKDRVWNRDLAAVLNFRKILFSLRETGDRPEAFNKSRKDGNRKRKPPTKENKRTKRTKHNSASVIDEASTVQG

SEQ ID NO: 4854 - protein, 394 aa, Naegleria lovaniensis
MLEQNKGKTLLTTTEDDYFKILKNPQTNLRFKQTRWLWDQELKHCPADIKLNAVKDFVKAEKITRYKNKQAAEKESKEAARKAKSKFLKDVQKGKKEMITDEELNERFNPKHFTRQPREFEMKGRSNQHPYQSFKVTNISLSQEGVLLKPTFFKGNESACPSKKSTDHLLKFYYPARARKWLKEEIDNKKFSHETTFVRERGRYFVCLPVRYHKALTRQEFQRFDKSFYESNSNSGTEYDTKFLKDCPQPSQDELRKEYIALDPGVRCFMYGYDSNGDALEFAAQGENTILFSLSLKQDQLRSEIAKNKFLKYNSRQERKFYKGLRKALKKKIRRLESKIRNKVNDMHNKIIDYLTFHYSEIIIPEFNVKAMIARKQKQRKRQGKEDTTCQVIY

SEQ ID NO: 4855 - protein, 644 aa, Contarinia nasturtii
MGNAFNHLITQYITNVKNNIKVWAFSRIKKFFTPKRYELNLNRQGNLITELDVKRATKIVMFQSRVERNTNIDLLLNEAAGIGLPINVHFQNLIRDRWFQTIPIFINIQRQIFDFHAKYEMLKQRWFQYRRDPNNNVMPTTPLPPKIKNFLVVPIHDFDMKHIRIDIHLFYLIARKFGALKLAKGKRGQPINIEKTEYDSNPAFYWNLIFDMPKISKLGNGKEFDFAVATDSVAVSLCFVKPERNTPELDNNTIKEKYNNFEFDYVLGIDPGVRTWNATVRKHVRSGNEENITIDGPKYHFKAKYGKRKRKSDQWTELLQKQRDLDYKRYAFFPSPKGRSHWMCYIAYYVKMMKPAMAVYTTRKFIRLRLDKYIEENRASDKIAASLTKKKSALVFIGAAQIAPNSPIGIKKRLRCPGLRRLLNSFKKLGNCIVRLVDEYNTSQTCAKCFRPFDRRTKSDRYKVCQNCIPSEDESSQWNLPNVIITMKSNRVYQQLRKYAVDFVNRLNAANPDHIPMDSDGLVSKLQVCFKNWQLNTGIWKDNRAPFQLKTVWHRDIVAAKNIMYKGEKISLKLKMFKNVLANNLLFTILFLGLCTVLGLDIHPQLLRPQNQNAAVQNQAADDEDSSDDEDYVYVLDVSDDDQF

SEQ ID NO: 4856 - protein, 741 aa, Contarinia nasturtii
MSGRKRNHESAFKPRKKIKIKEHQTIKKSARKGLKVNLPINTGKFAQLIDVYVLEMTRCYILGALNLHYFTSDHFKRSTDEQIEAFYTQFVDKNFFRDWFYGVQFIEHAFNDARESGYRLCYGIWYYCQKYGVRAPVIGGFGNVVEYAVQMFYTNYKNNICMHAHSRIRKFFTHQNASKAQIDDTMDFLFKRNSNCVPDLNLMWELENTLKPIRFDDGKGYFFAMESNWFKYIPIFLNLQQYIRNHERERKAALKRGERTELREYRNFTVVPTSSFERHYIRIDRRVFYRMLRQIECPHRLFRNKNGGPKQKEEIKNKEWDVLWRLYFDIDSIEREPRNKNDGHATIKFDNSIQTDGVGMSFLMERTKFIIEKDDEERMKETQDMLLKSQQVYGLDPGLRLVIGGVRINNFNDRNNRTETIIRLTSGQYQDMINSSRRNKWRKKLTTEIDEKMRLHRESFDEQPGPRAEDHKSYADHILRHFEEKFTAYTQYEYALQAFLQYIDTNRALDAYATKLIDGKQTFIFVGDRFIAADSPARGYIRSKVRDLFEKLKRRRKCTVVEVDEFRTTKLCSLCFRELEKPTKRGKVKEKYRYLTCHGCEPLCGENVLGKAQGPIESRKSNRKLTQQRKHRPRTDGPRMASKFRKYEEKTQIGRTITWNRDANAGRNILYKGWCAVMNIELHPAFQRHVEEEEENAGGGDPPPAPPARARQSRRAASNQNQQTTQRTLRSHLDQARSSRP

SEQ ID NO: 4857 - protein, 648 aa, Contarinia nasturtii
MVERNSEEQFRWPDDEKLGNGLRYFYKQYITNIQTNTNTWCEKRLENFFRMRCWYRNRFHNGSRFDNIDIRNAKEFSYRFKNLTNGNNVDPQRVEKFNILMRDLTEIGWSGTVSMKFFAKYRWFESLWLFGQMQRQIEVYHSHAEQWNTIHEMFRNNPNFQEPTINRPPKISSFALIPLCDYHLKNVRLDIKDLYYKIVNELDLVPSFLNTQTNRMNKRNLKYYTQTDRSGLWNMLFDVGKINKLGKSKPFHHQILTDSVSISIMYKKPQRQQRPQRQQRPQQTTQANRGPEKLIGKKYIIGIDPNEKSWLTVVRRNIQKTPDEPAVEENIIIPNQRFHWETQQKKRDKEAKKLAGWFDIEEKEHLKTYPYRPPSPRNSTWKSYIEYRIKMLRKGMAAYATREYARLDLDHHIRSTRVNDQIAVRVTNNKPSLVQFGAWAMKPDRPFGIKKRKRCPGSRKFRVSIKKLGHSEVEMQDEWGTSQTCANCQERFPRHTKDDRFKVCYDCRAKKIDGLPDSVAGLPDIIVSTVNRRVLRRKRAIIKRQIIDGNREAVNEKLRTGRLMSKVKVTYKNWPLNVDDDDVVPQTVTWHRDIVAAKCIMLKGMNQLETEYSLFNVFALNYIGLCRIFDVPLPVSLLRPPDQNNNVN

SEQ ID NO: 4858 - protein, 451 aa, Contarinia nasturtii
MLRQIECPHRLFRNKNGGPKQEEDIKNKEWDVLWRLYFDIDSIKREPRNKNDGHATIKFDNSIQTDGVGMSFLMERTKFIIEKKDEERMKETQEMLLKSQQVYGLDPGLRLVIGGVRINNFNDRNNRTETIIRLTSGQYQDMINSSRRNKWRKKLTTEIDEKMRLHRESFDEQPGPRAEDHKSYADHILRHFEEKFTAYTQYEYALQAFLQYIDTNRALDAYATKLIDGKQTFIFVGDRFIAADSPARGYIRSKVRDLFEKLKRRRKCTVVEVDEFRTTKLCSLCFRELEKPTKRGKVKEKYRYLTCHGCEPLCGENVLGKAQCPIESRKSNRKLTQQRKHRPRTDGPRMASKFRKYEEKTRIGRTITWNRDANAGRNILYKGWCAVMNIELHPAFQRHVEEEEENAGGGDPPPAPPARARQSRRAASNQNQQTTQRTLRSHLNQARSSRP

SEQ ID NO: 4859 - protein, 354 aa, Contarinia nasturtii
MSFWMERTKFVVVKDENEIMRETQEKLLKAQQVYGLDPGLRLVIGGVCVTNYNDPNKENRREKLVRLTSGQYNHMIGYRKRNKWRKKLTFNIDEKMRIHRESFDEQPGPHSDNIDRYVDHILRHFNEKFEAYTQYEYALQDFLQYIDTNKTLDKLADWLIDGKETFVFVGENFIAADSEAKGYIRSKVRDLFEKMKRRRNCTVVKVDEFRTTKVCSLCFKDLEFPKKGDRVKMKYRYFTCRGCEPLPEGNKPHGPIDSRKSNHLLTKQRKHRPRPGPRMASKFRRYEEKRTIGRTITWNRDTNAGRNILYKGRCAVMNEELHPVFQRPTAPIQNQQPIQGTSRSIQDQARNSRP

SEQ ID NO: 4860 - protein, 251 aa, Contarinia nasturtii
MKHIRIDIHLFYLIASKFGALKLAKGKRGQPINIEKTEYDSNPAIYWDLIFELPKISKLGNGKEFDFAVATDSVAVSLCFVKPERNTPELDNNTIKEKYNNFEFDYVLGIDPGVRTWNATVRKHVRSGNEDQGYLSFENITIDGPKYHFKAKYGKRKRKSDQWTELLQKQRELDYKRYAFFPSPKGRSHWMCYIAYYVKMMKPAMAVYITRKFIRLRLDKYIEENRASDKIAASLTKKKSALVFIGAAQIX

SEQ ID NO: 4861 - protein, 201 aa, Contarinia nasturtii
MKSNQVNDNIAVTVTNNEPSIIIFGASEMPPKRPFGLKRRKRCPGSRKFLVSVKKLCHSVVKMEDEWGSSQTCANCQERFPANTKPHRFKVCYGCKAKPIAGLPDSVASLPDIIVAKVSKRALQKGRKETKRRIRNGNYQDVEEILRNGRLMSKVKVTYKNWPLNVQGDVAAAKCIMLKGLCRMFGVLVPYSLRRPPNNVT

SEQ ID NO: 4862 - protein, 297 aa, Contarinia nasturtii
MLRQIECPHRLFRNKNGGPKQEEDIKNKEWDVLWRLYFDIDSIEREPRNKNDGHATIKFDNSIQTDGVGMSFLMERTKFIIEKDDEERMKETQEMLLKSQQVYGLDPGLRLVIGGVRINNFNDRNNRTETINRLTSGQYQDMINSSRRNKWRKKLTTEIDEKMRLHRESFDEQPGPRAEDHKSYADHILRHFEEKFTAYTQYEYALQAFLQYIDTNRALDAYATKLIDGKQTFIFVGDRFIAIDSPARGYIRSKVRDLFEKLKRRRKCTVVEVDEFRTTKLCSLCFRELETRQKLAK

SEQ ID NO: 4863 - protein, 637 aa, Contarinia nasturtii
MTRCYILGALNLHYFTSDHFKRSTDEQIEAFYTQFVDKNFFRDWFYGVQFIEHAFNDARESGYRLCYGIWYYCQKYGVRAPVIGGFGNVVEYAVQMFYTNYKNNICMHAHSRIRKFFTHQNASKAQIDDTMDFLFKQNSNCVPDLDLMWELENTLKPIRFDDGKGYFFAMESNWFKYIPIFLNLQQYIRNHERERKAALKRGERTELREYRNFTVVPTSSFERHYIRIDRRVFYRMLRQIECPHRLFRNKNGGPKQEEDIKNKEWDVLWRLYFDIDSIEREPRNKNDGHATIKFDNSIQTDGVGMSFLMERTKFIIEKDDEERMKETQEMLLKSQQVYGLDPGLRLVIGGVRINNFNDRNNRTETIIRLTSGQYQDMINSSRRNKWRKKLTTEIDEKMRLHRESFDEQPGPRAEDHKSYADHILRHFEEKFTAYTQYEYALQAFLQYIDTNRALDAYATKLIDGKQTFIFVGDRFIAADSPARGYIRSKVRDLFEKLKRRRKCTVVEVDEFRTTKLCSLCFRELEKPTKRGKVKEKYRYLTCHGCEPLCGENVLGKAQGPIESRKSNRKLTQQRKHRPRTDGPRMASKFRKYEEKTRIGRTITWNRDANAGRNILYKGWCAVMNIELHPAFQRHVHI

SEQ ID NO: 4864 - protein, 766 aa, Contarinia nasturtii
MDDDELDDNQPEESKYVVIKCGLQTILRQQHERIERVGEVVTKMLFERSVQMTEVAALASLSILFILNEALDNDDRAFFLKPHPSLFIADCFRAVLNQHVNNINSQYRILPEFRFMVERNSEEQFRWPDDEKLGNGLRYFYKQYITNIQTNTNTWCEKRLENFFRMRCWYRNRFHNGSRFDNIDIRNAKEFSYRFKNLTNGNNGNNVDPQRVEKFNILMRDLTEIGWSGTVSMKFFAKYRWFESLWLFGQMQRQIEVYHSHAEQWNTIHEMFRNNPNFQEPTINRPPKISSFALIPLCDYHLKNVRLDIKDLYYKIVNELDLVPSFLNTQTNRMNKRNLKYYTQTDRSGLWNMLFDVGKINKLGKSKPFHHQILTDSVSISIMYKKPQQQQRPQRQQRPQQTTQANRGPEKLIGKKYIIGIDPNEKSWLTVVRRNIQKTPDEPAVEENIIIPNQRFHWETQQKKRDKEAKKLAGWFDIEEKEHLKTYPYRSPSPRNSTWKSYIEYRIKMLRKGMAAYATREYARLDLDHHIRSTRVNDQIAVRVTNNKPSLVQFGAWAMKPDRPFGIKKRKRCPGSRKFRVSIKKLGHSEVEMQDEWGTSQTCANCQERFPRHTKDDRFKVCYDCRAKKIDGLPDSVAGLPDIIVSTVNRRVLRRKRAIIKRQIIDGNREAVNEKIRTGRLMSKVKVTYKNWPLNVDDDDVVPQTVTWHRDIVAAKCIMLKGMNQLETEYSLFNVFALNYIGLCRIFDVPLPVSLLRPPDYNNNVN

SEQ ID NO: 4865 - protein, 427 aa, Contarinia nasturtii
MNKRNLKYYTQTDRSGLWNMLFDVGKINKLGKSKPFHHQILTDSVSISIMYKKPQRQQRPQQTTQANRGPEKLIGKKYIIGIDPNEKSWLTVVRRNIQKTPDEPAVEENIIIPNQRFHWETQQKKRDKEAKKLAGWFDIEEKEHLKTYPYRPPSPRNSTWKSYIEYRIKMLRKGMAAYATREYARLDLDHHIRSTGVNDQIAVRVTNNKPSLIQFGAWAMKPDRPFGIKKRKRCPGSRKFRVSIKKLGHSEVEMQDEWGTSQTCANCQERFPRHTKDDRFKVCYDCRAKKIDGLPDSVAGLPDIIVSTVNRRVLRRKRAIIKRQIIDGNREAVNEKIRTGRLMSKVKVTYKNWPLNVDDDDVVPQTVTWHRDIVAAKCIMLKGMNQLETEYSLFNVFALNYIGLCRIFDVPLPVSLLRPPDQNNNGN

SEQ ID NO: 4866 - protein, 545 aa, Acanthamoeba polyphaga
MAKTTNGKFWNDECEKISDLLWKPNLIVNHKPQERINFKCDNKYITFNYYSNNVPINDQLKFIDIPQSNNTDKKNKLMDRLLKIEDTRYKKDIESNKTRKIKLTKEQLTAKHNTQLLKIQNKISQLDGFIRSRRIQLLPNYFQKHILDIWFNETTIIYNQLLTEFTQYYIKFKEIASDNKELVNLLKTNTEFPLSLQKLRNLKIHDIINIYLEDQLIHKLETPFCVIANTIKEFVANVKGNLTKLAENKINEFTFKHKNFNRKIRTISVDSKYASENSFYPDKLGKLMQTYEDLKGFSWQNVKHDFKIVYDKYDDKYYAHIPKYVYRNLNILNKKPIAVMDPGERTFQTLYGLNHVISIGDNLRETISKRLLRIDNLKSKLDTPGSKKHNLKLNRKTRVRKCRYKKAIDRHHKKIEHLQRELHYKTAIYLCENYQRIMVTDFSSKKVSSKDGDLDAMSKRILGKISHYRFRQRLQQKCEEFNCQYLEVNEAWTSKTCCNCGYIHAKLGTSKIYDCPKCKQKRDRDVNGAINILLKNRKLVLMEDQ

SEQ ID NO: 4867 - protein, 520 aa, Acanthamoeba polyphaga
MKEAVKTVKPKVPAKKRIVTGSKTKKKVFVKKKPPDKKPLKKPVKKTVKTYKLKSIYVSNKDLKMSKWIPTPKKEFTEIETNSWYEHRKFENPNGSPIQSYNKIVPVVPPESIKQQNLANKRRKTNKPIVFISSEKIRIYPTKDQQKILQTWFRLFAYMYNSSIDYINNKKVVLESGKINITATRKICNKISVRKALKTTRDNLIQSTNPSIMTHIMDEAIGLACSNYKTCLTNYIEGHIKKFDIKPWSISKRRKIIVIEPGYFKGNSFCPTVFPKIKSSKPLTMIDKTVTLQYDSDTRKYILFVPRVTPKYSVNKEKNSCGIDPGLRDFLTVYSENETQSICPIEIVVNTTKNEYKKIDKINEIIKTKPNLNSKRKKKLNRGLRKYHRRVTNKMKDMHYKVSHELVNTFDKICIGKLNVKSILSKANTVLKSALKRKLATLSFYRFTQRLTHMGYKYGTEVVNVNEYLTTKTCSNCGKIKDLGASKIYECESCGMYADRDENAAKNILKVGLKPWYKQK

SEQ ID NO: 4868 - protein, 482 aa, Acanthamoeba polyphaga
MVHNQDLSISNKTCGISDWLPSVRNKKTSDIKSNSWFDIRRCLNPNIKTKFVPVNNKQIVLKEPNCIYLKYDLITLNPSSDHIRILREWFSLYAKIYNYAINLIRKMFYVNNKLIKSRLQCEIYDEIIIRKLSNDKTKLIESLKLSDRPPEFLLDYAISHACTYCNSQVKKYLKDSKNPYNKKTLRFRLWSLHKSRRVMHILPPKLCDKNVCNGLFLKLNPSKNIHDIYMFCVMSWDRLTGKFFVYKPVLKRLINIPKKQFTRCGIDPGVRTFLTLYSSERTYDVCDSTFYNNKIKRMWRKIDRINFLLHNRKKRKKRKNDRRLRKSLAKYYRKIRQRIKDLHTKTAKYLVSRYKEIYIGIYDTSKNLSDPRISFYEKRRIATLNHELFLTKLQQVADRFGSSVFAINEHMTTKTCSKCGRINEIGSSKVHKCACGMYAGRDENAAKNILKKGIKEHYLSAQSDKNVTEYNNKKSNNTNKET

SEQ ID NO: 4869 - protein, 817 aa, Ectocarpus siliculosus virus 1
RRKCRLVGCTADHQMRNTTPMMPSDVKCGGIQNAKVYSKVWNFNLAPVTQFIIISIILFIMVRPSSDGNSHKKKKHKKIPPRAPPKNIPGFLQTVASLYPNQYLTASGNLPKSCKGTYCCQLFSRVRFGKEVSQQLRTRTVSVGFRAATTDEKRDTFQSKVNDAVDHLSRERVLASLFANFVFMERLQNGSALPEPDRAFFKSCLSSCILSRGGGSLNADFDRFSEITGLTRLVPPKSMNLDQQREHEAQRMATATSTRATHHAEKRRISITRWFLRGRISRGDLDCKKYATKLYNLAEKIITNFDGTPEDTQKLRTMSRAIDPGTDTNIIIDFAWQEKEFSDRDRGDGKSAETIKHLNWMFNTYVAESRRMYEEAVSRSHLFAPGKDKACRKKRDEFMKHELGEEFTYAPPKDTAVLPICSTGAVFIYIDMKTLGSWGLLHSNDAWWYKDVLRPFSKEANVKCLVNKENARYASSEHGYLSSLLESGPDKCPWMIGESFLTDGVQIKLLLKTLEHGRKAFSGSSELNEKGYNKLPRADVQLESLLGEGRGVYNISSLLKSTSIREDVVVMSADPGQAKVINVSSATARTWAKQDPGVILKTSTCVFGDDYRRDTLASRSDEYETFRRKGQPYGVAIDRLGNEKKRTSCLATFIQYCRRWCVNGPVLFRETLQTGRKFMRFDRFRATQKTLALIADKYMGHVEDTCRVMLFGKASFRAQKGRASAPRKALIREMASRGVVLMVNEYNTSKMCPGCGEDTVEDKERRIRSCKNFKIGSPEESCRLHRLTPEFEMDRDDVGSTNIGMRGFGKLLGQVWF

SEQ ID NO: 4870 - protein, 817 aa, Ectocarpus siliculosus virus 1
RRKCRLVGCTADHQMRNTTPMMPSDVKCGGIQNAKVYSKVWNFNLAPVTQFIIISIILFIMVRPSSDGNSHKKKKHKKIPPRAPPKNIPGFLQTVASLYPNQYLTASGNLPKSCKGTYCCQLFSRVRFGKEVSQQLRTRTVSVGFRAATTDEKRDTFQSKVNDAVDHLSRERVLASLFANFVFMERLQNGSALPEPDRAFFKSCLSSCILSRGGGSLNADFDRFSEITGLTRLVPPKSMNLDQQREHEAQRMATATSTRATHHAEKRRISITRWFLRGRISRGDLDCKKYATKLYKLAEKIITNFDGTPEDTQKLRIMSRAIDPGTDTNIIIDFAWQEKEFSDRDRGDGKSAETIKHLNWMFNTYVAESRRMYEEAVSRSHLFAPGKDKACRKKRDEFVKHELGEEFTYAPPKDTAVLPICSTGAVFIYIDMKTLGSWGLLHSNDAWWYKDVLRPFSKEANVKCLVNKENARYASSEHGYLSSLLESGPDKCPWMIGESFLTDGVQIKLLLKTLEHGRKAFSGSSELNEEGYNKLPRADVQLESLLGEGRGVYNISSLLKSTSIREDVVVMSADPGQAKVINVSSATARTWAKQDPGVILKTSTCVFGDDYRRDTLASRSDEYETFRRKGQPYGVAIDRLGNEKKRTSCLATFIQYCRRWCVNGPVLFRETLQTGRKFMRFDRFRATQKTLALIADKYMGHVEDTCRVMLFGKASFRAQKGRASAPRKALIREMASRGVVLMVNEYNTSKMCPGCGEDMVEDKERRIRSCKNFKIGSPEESCRLHRLTPEFEMDRDDVGSTNIGMRGFGKLLGQVWF

SEQ ID NO: 4871 - protein, 693 aa, Ectocarpus siliculosus virus 1
MEVDTESPEPRTKKRCTRKSGVEQSLHAEGDEESSSTRRSCICLDLERTLVKSVIPKYIRDRLERMSRYTGSFRYIVGLFSNYVVIRRLEQGLQPPEVKKVFYDRCWAAINTRISGKNTRNDFSDLLDEFIDQTGFDTSLFPPRVPSRLQETVTREMEVSAKNSIVVHLEAKIKGFLRFRLMNDSQLAFQHLPAKDRSRIIISLSNDCLEREMRGDLDPGYVPHVLQVRDLLAQVYSTEPDVSVLKVLKKKPHLFLELISMISNVAEEASDNNRDLREETKTRSDEEKVRKAFYMSERIKRGLVDRPKMCTVLPVWKLAPCFPYYSSSVVGSTFHKEGHDFSSVSRFISEHFDLGRVNRKGYKPSGFRSDGYQVQVTFMTLVSKKPLVPGTKDLAKSGYQIAKKVVSLETQERGLFVLSQARKDSRKIVADRLHAYNLTVVDPGCASVVSVRSCPLEFCRCVGSVREKSTDWEMKGTEYSAKSGRTMLEGREKKRRSNDEYGRCFPRFSAVKKKTARKSSFVAYCRVAAETFKVMFAEKMKRARKRSRFHSSRLVQKTVDKLASSMAACPSDRKNIVLFGNGSFRAKKGHASAPRKKLVRAICSRVNVGMLDEFRTSKMCPGGCGGEMTDVQGGQRVRQCTTVSVGVENPCPLFENAVAFRYDRDASATLNFCLAGYCGLVRKSWPTHLLRGQ

SEQ ID NO: 4872 - protein, 693 aa, Ectocarpus siliculosus virus 1
MEVDTENPDPRAKKRCTRKSGVEQSLHAEGDEESSSTRQSCICLDLERTLVKSVMPKYIRDRLERMSRYTGSFRYIVGLFSNYVVIRRLEQGLQPPEVKKVFYDRCWAAINTRISGKNTRNDFSDLLDEFIDQSGFDTSLFPPRVPCRLQETVTREMEVSAKNSIVVHLEAKIKGFLRFRLMNDSQLAFQHLPAKDRSRIIVSLSNDCLEREMRGDLDPGYVPHVLQVRDLLAQVYSTEPDVSVLKVLKKKPHLFLELISMISHVAEEASDNNRDLREETKTRSDEEKVRKAFYMSERIKRGLVDRPKMCTVLPVWKLAPCFPYYSSSVVGSIFHKEGHDFSSVSRFISEHFDLGRVNRKGYKPSGFRSDGYQVQVTFMALVSKKPHVPGTKDLAKSGYQIPKKVVSLETQERGLFVLSQARKDSRKIVADRLHAYNLTVVDPGCASVVSVRSCPLEFCRCVGSVRERSTAWEMKGTEYSAKCGRTMLEGREKKRRSNDEYGRCFPRFSAVKKKTARKSSFLAYCRVAAETFKVMFAEKMKRARKRSRFHSSRLVQKTVDKLASNIAACPSDRKSIVLFGNGSFRAKKGHASAPRKKLVRAICSRVNVGMLDEFRTSKMCPGGCGGEMTDVQGGQRVRQCTTVSVGVENPCPLFENGVAFRCDRDASATLNFCLAGYCGLVRKSWPTHLLRRQ

SEQ ID NO: 4873 - protein, 468 aa, Megavirus lba
MENESIISTRKIRIFPCKEHIDLFNKCFGATRYIYNKTLDAIKKLYKKNSKALRTKAKKGCVHIAPKKKSGSKTTKHKTQCGNKLHNKYFCLKHKHIKPKFDMPLGFQFWRNKMIKKNTDLPESEKWLSDIPFDTRQLVIKNILANHKSAITNLKNGNIKGFDIKYKSRKNKNQFFFVDYRALKSDGKLWNRTVKTPLNMRKGEKKWFDNYMKEYGLKKFGDEKSDKERKDMVITREYPGMYYLHIPFSKFIEKKPIQKSIVSIDPGIRTFHAFYDPIGKSGKIGDGLINRIIKLYKKMDKIQSKITKTNPKNNDFRYKKNKLHRQNMRKRCAWLRTKVKNIVRDYHWKTASFYCKNYGYVVIPKLDTNSLKKRIKKDYGVSKGSPMIRRMMALSHNEFINKLVYKSREYNTKVLIVNEAYTSVTCGNCGIKHEKLGSNKIYKCIHCKKEIDRDINGARNILIKTLSK

SEQ ID NO: 4874 - protein, 416 aa, Megavirus courdo11
MNKSSWIPEKNINYINLKTNSWFDILKTSRKINKDYNKIVCTPDVLRCEKIRIYPTDKQRDILHKWFNLHRKMYNVTTKFLENKLWKNDVFVKKNISKYVNFRILRTKYLKSDKEKLCKHKVNKHLLDQAISRCVAMYKSAITNYKKKNIKNFRIRPLKKNKRYKNLIIEGCLFSKTKNSFCTSIIGEINSEKPFNNTKKTCILSYDKYKSTYTLNIPRDSGKGTFTTRKLVCGIDPGVRTFLTVYSKKDCYQICNNPNFKKYYKRMDRLNEIFTSEESCQTRKYKKSIGKMFDKINNKVKDMHFKVAKYLCSRFQILKLGNISTNKIVSKETGNIGKSTRRLLYSLSHFRFREILTHQAEKYGCKLKIVSEYLTTKTCSNCGNKKDVGKSKVYECNKCELYVDRDINAAKNIRYV

SEQ ID NO: 4875 - protein, 526 aa, Bandra megavirus
MFWNDQCAKLSKSLWIPSNTINLKSNKKKYFKCDNPNISFNYFTDSIKINKKIKFNDIKITDNRDKKEKLRNKLIKTENTRYNKEQNNQKCKLNKQELNEKHKKFLDKIEIKVNQLDGFIRSRRIQILPNNKQKNIIQKWIYDTTSIYNKLVCSFNQIYDKCQKIVDNMNVENKFYHLGKIIKQNTEFPINFHKLRALKCSDFIQDYDRIPYCVIADIIKEFVSNIKSCITKISKGLITEFKFKPRKYNRICSSIPLESHYTTARGFYPSIFGEIKTNEKIFSWLDIKHDYKLIYDKYSNKYYIHVPKYVYRNDLTIKKPIAIMDPGARTFQTIYGLDHVITIGDDLGSTFKKRLLKIDNLKSKLSKPGKYKHNKKLDRKTKVKKWKYKKAIDRHHKKMDHIQQELHYKTANYLCSHYNRVVVTNFSSKKVGLKKNDLDAMTKRILGKLSHYKFRQRLLTKCEEYGSQYYEVDESFTSKTCCKCGNIHKTLGSSKMYNCTKCKNKLDRDVNASICILIKNKDILLK

SEQ ID NO: 4876 - protein, 667 aa, unidentified
  source 1..667: note = Indivirus ILV1
MTTIKKPPDEIRTLKIPLKKIIKNEKLIPIIFDAVSRTNQIIIHTYMFLRLWILDKYNNKMDIPTITEDIIHMGFKALTLESFGPKPKGQNKIYYEEFLKFYENIYKQLGYTQKLNGKNLSQILNYSATSIKTCIENNIKLHFFDYMRRFVNTSFSKQHSEILESYKGKEKTEMTECLKKELLAVKQDLLDNTKLSDKKYHKWIDIHRPNIFPKDIETVTQSDINGDPCKFIKNMIYMVTQLENNDQKLFQFFPLRTSIIPKYATIDTKTLIELFEKDKQEKLKDIEKYKKEIWKTHFKTDCNIFKMNNYSFNYLISTDCYAVSINFIHDDFLEKKNEKSKLMANGRINQKINTKGLSQKEKDKLKHDKKELQKAKQKAARQKKKEEFSKLTKEEKKQFMENKKKNTYIEFPYIDELSQNTLKDLLNNCIYIDPGKRDLLKIIDDDDNLFTFSNREYINKTKRKEYSNYFQKYKDKTGISKIEAQLSDFNSKSCDIDKFKKYISKKNEINGKLFSAYCHEKFRKYNWYSFINKQKTESNLLNTIENKYGKEGKKLNIVIGDWGKGKQMRGFISTPMIGMKRVLARRFNVYTIDEFRTSKYHYKTETIGKNLYVTDKNNESKKIHSVVTFKMENNCMGCINRDVNAVKNMRKLVKHWIKYNEKPDVKS

SEQ ID NO: 4877 - protein, 814 aa, unidentified
  source 1..814: note = Indivirus ILV1
MKKKKEPDKNKSDKEKEYEEKYRKYITSYKTHKTSLENIIKNTDDLEKINDAVYRINLIICHTYQFLKLYYLYEFHNKGRIIVIDEQLVNTTMKLFCVRDKRGKNPSEKVVSLKQKLQKFYNNHYEKLLPEKLQISFTNLSTILDYEKKNIVTCIKTHISEHFEQCINRYINVLVDKDKNMNYIKYMKHYNPDNNLMHYMDTKTPEELKNRMIINGKNVPNNKKLSEPLKKKLMSVYTKELNVLKRDIMMNEDKCNPKYNEVKEKIRNDILNNLFNDYVKNALNNGLNNIYSIIDNSNQLINGELCTDDSVLPDDLKGYIKEYNKKRADKLITDILSNNITDNNTKLVKKKLIKQYMKTSIYDKINNDPLSLLPSLIKINIALEEKGLKTMSVFPLRRSIIPKYTTIDTTTLVHVLFPESMNKGEYLTKGNLKKYQSKIWETFFNMKNKIFKNKKYQFNYQIDTDGVGCSVLLIRKDLFNPNKRIRVNHIKKPVRFRSERYVDELMEEEKELYIQLKKAVIDPGKCDLIYATDGEVQSYTKKNGKSTYKIKSFRYTQRERNQETKKRKYSKIRENDKVNTVIKCNHIDESFINYLKENGYYEVMGYVKTHKISKTVKELEDILSSANSKSCNYKKTQEYIRIKSAINNVLQEYYQKKLYRKLRWNSYINNQKSEARMINQFKKIFGNPNETIVYFGNYGGSNLKHCEPTKGKGLRKIFRNVGYRLFLVDEYNTTKKNFITGQNNEKFLMRRNPRPFKQGVKLVHGLLRSKTIQSNEPMTTGHILVNRNTNGSMNISKLVDCVLRNTPIPPYLTR

SEQ ID NO: 4878 - protein, 674 aa, unidentified
  source 1..674: note = Indivirus ILV1
MSAIEEKKTKPPDKSTDYFKCVKIPLKHVLKNPDINLSKITDAVIKCNKIVINTLMFMKLYLLDYFEKNNKLPEIDKVFVNSCMKILCNESASGRPPKKEIKELKDKLTAFYKSDYKPLIKDTDLDYTHLNTVLDYLTIGIITMYENNIKLHYVEYIERYVNIVWKKKETILKIKEENKKEDKQKELVNEFCRQLRKIKTDILEISSEYKSDVKYHNWIKDIKKTITPNKDKYQKDNLYYDLQCDPQEYLPCMIRMMKEVEKDKVMIYNVFPMRNDIIMKSIKLDTTTLVHLLFTQKQGNKTDYLLEGNLKKHENKIWEFFFRTERQCFKKPKYTFHHMIETDGVSCSILLLRNDLIGKRIPNIKVGSNTEQYIDELNDYTNIKNKKIVSYDPNLADLIYCVDNDSKEANEFRYTQDSRRKECKIKKYAKIILEFKKEKIEGKTIIEYETELSKLNRKTLTIKDFKEYIKKKSEINNKLYKFYEKYIFRKLKLNGYINIKKHEQKMINNFKKIFGKPEDVIICAGDFEQKQHMKYKEPVKGKGIRRIFRNNGYKLYLVDEFRTSCMCSICKEETGRCEKFITRKNPKPYKSSNILVHGALRCKNCEAVWNRDVNSATNIYRIAKNAINGIERPKYLCRENKVDDKVEKLKKEKVKKVVQKKANKSVKVVALTKS

SEQ ID NO: 4879 - protein, 363 aa, unidentified
  source 1..363: note = Indivirus ILV1
YNKVLASINNGEKINSFELRNKYVTSKTRDGKNNPLIKEWEKKIPKDIRNGAIRDLIKNYKVCFSNKKNKNINFKMKFCSVKDTPSIEIPNTSISIKENKIFIFKKYLKSGIKTGKKQLFNLDIKYFCRLQIVNNEWFLIVPYKKEIPQNTVDLRHDFCALDPGTRTFQTIYSPELCLQIKVNKEKIKSYTNKSDKFDSLRKKKKITRKRHKRRKRKIYSKISNLIDDMHFKTINYLTKTFKHIIIPVFQTKNIAMKSNNKYLNRDLMLMKHYSFRTRLQANGSLNKCHIDVCTEEYTSKTCGACGLLNNVGKSEIYNCFKCKTIIDRDINGARNIAIKRLSEYKSYKKNKVTGKKNINIITL

SEQ ID NO: 4880 - protein, 526 aa, unidentified
  source 1..526: note = Catovirus CTV1
MSSKKILNRRQKKKKKKEEKLKRRNLEINNYKKTIIKHTNNIWIPPHNIKYKNTDTDSWFTIKKYEDKKNNKIDDFKCNIPTNKNKAKKLMPCTKVNFYPTKMQKIILERWFDAFALMYNATLKFIKQKFKENKDNNNNAEATEKKSTSVVKTISKKKIKIVAKKPKKKINPTNFYNNRKMLKNKRCEIETNSTITNKKQLDVINSELKQRKNTKKKSKKIKPVRTSINSHTLDYAIKLACINYKSALTNYRNGNIKFFRIRYWRKNRGNKILVVEKQFIKKNTIFQKLFGDIDLEYNREKYTLKAKSNITIHYNSKEKKYLLLVPEKCEVKEAVKKNKTIVLDPGIRSYMTGISKNEVIKIGNEQDKIKEILMRKDRIMENEKVPYVKKKKIERRLNTRIKNMVNELHWKTINYLVNNYDNILIGDMSVKSIVSKNESTLARITKRIGYSLSLYLFKQRLEYKCKLNKKRYSEVNERYTSRMCSVCGWYNEKLGGDKIFECKECKRTIDRDVNGARGIYLKHLQK

SEQ ID NO: 4881 - protein, 461 aa, unidentified
  source 1..461: note = Catovirus CTV1
MQKDYKKRRKKFIDSFCSFLQKHTNKLPHTLNNKKHITHDSFSWFDINEFTTNKATDKNINFPSKFSNTYTKCKKIKMKLDRKQRIIINKWFDVHTDMYNSALKYIRDTSDLFKNHVIKSKLFNVDNNLINSFKLRDGLIKTRKELILKSQINTIDDDTKIHSHTLDYAVRQLVSNIKSAVTNLKKGNIKRFRLKFWKHSRPSKTMDIEKAYISGNKICHKILGDISYEYNNEEYIPENFTCGVKINYNSMTDEYLLLVPERGPVKETKKTKNIIVLDPGLRTFMTGLSESALYKIGTNITSTVKKSITRLNKIKENVHISKKIKKKNERIINRKITNKIDDMQWKTINFLTQNFKNILLGDMSAKSIVSKNKSVLDNETKVACLRMRFYDFRKRLEYKCNKTKTNYRLINECYTSKICSLCGNYNEKLEGEKIYKCSKCKKEMDRDMNGCRNIMIRSQMR

SEQ ID NO: 4882 - protein, 458 aa, unidentified
  source 1..458: note = Catovirus CTV1
MTKKKKKFKKKKIFYKKYHKFNWLSRLFNDNQFSDLSSYIFFHGDHFWKHKYNLPFKSQLSFSWFDFHKSIQISPANPIMPSDARFVDKTKFNAKKTESFVLHPNPLQKKILLTWIDAFTDMMNETIKFQKNRLFHKKQLILDSRKLRDHNLKTIKNKIIARTGVNSHVMDQAIKLICEMYDSSIANIRNHKRPFRIRYIKKNKNKRILKMEKILISKNGKTFCSSVFGKFLDNRLSNVTSDFTIQYDKLKDRFMLFYTKNANKIKTNKKDQMGLDPGIRTFLTGYSNNHAIKIANNAHDRISDIHKKIDEIRGSNLSKRRKIKALEKRESKIENLVKDLHWKTAKYLTDNYGEIIIGNFSTKKMGEQEGMNKMVKRVGNSLSLYKFKQKLQYKCLLKNVKYKEVDENHTSKLCSNCGVEYKWNLQGKKIYDCNYCGLEMDRDINGAKNIMIKSIIRK

SEQ ID NO: 4883 - protein, 458 aa, unidentified
  source 1..458: note = Catovirus CTV1
MTKKKKKFKKKNIFYKKYHNNNYVSRLLKDNQYSDLSSYIFFHGDLFWKHNYNLPFKSQLSYSWFDFHKSIQINPANPIMPSDARFVDKTKFNAKKTETFIIHPNPLQKKILLTWIDAFTDMMNETIKFQKNRLFHKKQLILDSRKLRDHNLKTIKNKIIARTGVNSHVMDQAIKLICEMYDSSIANIRNHKRPFRIRYIKKNKNKRILKIEKNSISKDGKTFCSSVFGKFLDNRLSNVTSDFTIQYDKSKDRFMLFYTKNANKIKTNKKDQIGLDPGIRTFLTGYSNNHAIKIADNAYDRISDIHNKIDEIRGSNLSKRRKIKALEKRESKIENLVKDLHWKTAKYLTDNYGEIIIGNFSTKKMGEQEGMNKMVKRVGNSLSLYKFKQKLQYKCLLKNVKYKEVDENHTSKLCSNCGVEYKWNLQGKKIYDCNYCGLHMDRDINGAKNIMIKSIIRK

SEQ ID NO: 4884 - protein, 462 aa, unidentified
  source 1..462: note = Catovirus CTV1
MTNKKKKFKFKKKKIFYKKYHNNNNNSLSRLLKDNQYYDLSSYIFFHGDLFWKHNYNLPFKSQLSYSWFDFHKSIQINPANPIMPSNARFVDKTKFNAKKTESFVLHPNSEQKKILLAWIDAFTDMMNETIKFQKNRLFHKKQLILDSRKLRDHDLKTIKNKIISRTGVNSHVMDQAIKLICEMYDSSIANIRNHKRPFRIRYIKRNKNKRILKMEKVLISKNGKTFCSSVFGKFLDNRLSNVTSDFTIQYDKSKDRFMLFYTKNANKIKTNKKGQIGLDPGIRTFLTGYSNNHAIKIADNAYDRISDIHNKIDEIRGSNLSKRRKIKALEKRESKIENLVKDLHWKTAKYLTDNYGEIIMGNFSTKKMGEQESMNKMVKRVGNSLSLYKFKQKLQYKCLLKNVKYKEVDESHTSKLCSNCGVEYKWNLQGKKIYECNYCGLHMDRDINGAKNIMIKSIIRK

SEQ ID NO: 4885 - protein, 725 aa, Hokovirus HKV1
MKKKKKKKNDFLDSQINNDNKIEYNLKTKKVIKNITNKNKLLNKLKNVKQKNVINESNIIINESDIIINESDIINESDIINNNTKKIRKKRSTNKKFDNSDISEKKLTKKEIIELEKIEQEKNNINNHIPPWESDDIKIYRNILHFPNSNIPEIINPINCNLFDSYVNKQSNNDFNNFLINNNYNFKELNNKDIEIQKINVERNEHINNIFNKYTKINENLTDAKNQDIKDIQEKYKKYKQNKKIIEGKNKINEIENDYVKKHSDNENIKNKTIKNANKLYDDKIKCVRGSIKSYKYRIIFSEEQKKIVLNWINICDNFYNFCVLRHKEQKVKGYINKNDPKSYNLDKDPHSIKTKVFEDYFNVYLKNNYKKFNHIKFKPLNVKNISDYHKDYQIDDILENKPLPYDMITDVLSEFSRNLKSNYTKVKQDPNFRFNMGPKDHYRTYKTIFVPKKSIGLNGLFFNYLGKIKKYNKNLIKVINENKINHDCKLSYDSLLDKFYLHVPQYVEHKKRTENKEKYVAIDPGEKVFSSFYAENSYGHLGINMREKILSLKNKIERIERILSKNKNKKNKKIRCKKKLRKKKHKLEEKIKNMVKEVHNKISLYLCKNYENIILPSFETSKMLRGKLNKKVKTVLQRQSHYKFKEHIKAKSEEYGSQIYIVTEEYTSQSCGICGKLSKNYKNRIKKCSFCKTKIDRDINGSRNILIKNMFNILCGAPRPQASY

SEQ ID NO: 4886 - protein, 840 aa, Hokovirus HKV1
MIFLLYHVIFIYNYTLMNFRKTLQKCKEKLQNNIINQNDSIWMPLDVRVCDNYHFKTDSFNLIVKYDSEHLEHNNTFHFNNYEHLQAKIVNVFFDKVQKSIIKTWMKLYKYTYDTVIQIFSHVYNLCNIYYKINFYDARKILTNFISYNCKNNYKFNYFYKLNKHTIRKFYFYRNNKLCNKEIKILKKQFTKIKFNNIYNSDNYINLFKILKEYRSEYVKYVKFYSANPIHFLNKLHFTDFYNKLQDEYKQLFINLKCPIEEIILQEKNINIPIFKYDDYNPYMKKYTDFIKNRDNINNYEEHNKIYRLYVNYENKLINKQKRLLEIRSKLIYTKLSVIVKLIDNVINTFYKHIYKIIEEKLPQQVNNFVDQVKLYKTNEQFRNKKNAILQKYGYKTTINYKNTINEMRKSSVGKKIIINEKKLLYKDIIKTNHVSIFEPKYTNSLRNNTNVSRHTIDLAVEKACANYKTCLTNLKNRNIDNFNLREIKLRKMIIDIEPNEFSKEGIRKNILGTTTGFYNGILFDFTTINKATILKYNEKLNKYTLHVPYINKNLSEDEKKEKIKILEKKLKMTKKQKKRNKRRRKEKIKKRNNKNKKKETIKNIKKEIKRIKKNNMEKTGEGTISLDPGVRKYLTGYSSEKKKNIEIRENIKIKKNCYKIYETTKKYGLSSGKKKKVKKKEKKEKKEKKVKREIKVISEKEKEKVKRKLENRSKKVYRQMTDFHNKVIKYLTENYASILIGDMSLKGILNKKTSKLKKKTKYLCTRLRIGMLRTKLKKKCEEKNLKYKLVNEAYTSKTCTKCGTINENLKSKETFNCNECKIIIDRDLNGARNIHLASL

SEQ ID NO: 4887 - protein, 662 aa, Hokovirus HKV1
MKKSKPKVKEKKKDKENFDFMKTNKDNINNVIKDDNINPIINELVSRTNKIVIHSYQFLRLYFIHLFHNNQPFPTLDKEFICDIFKVITKRKCNSGGYRDDNMPEQLKTLTTFYREHYSKTIIKDEILYYDKLSYILAYEAIDMITNINNNIQEHFIDHLNKYVNIIFDVKKQRDEITKANKDKELRKQLHKALYEDINKVKKDLVSFDTLTSNEKYHKWIIEQRIKLFSNKNKFEENNIYYELKSNTQYFLHSMFYICNELEKLNNVKIEKEEEKQIRLFNVLPLRTNIIPKNICIDTCALISNFLGDEATSEYLKTYKKENKYNELWSKFFDLSKRVFKKGKKYTFSHMIRTDGISVCILFIRVDVNGKPLSKTYQNKKCCQEENINYIEKTEITEELKNMKVVCADPGMSDLLYFGSYNEKNELETFRYTQNQRRLETRNKKYNKIIDKVNKETFINDKTIKDLETTLSNLNSKSCNYEKFKLYCIEKNKINNQLYTHYEKSFFRKFKLNAFTNTQKSESKMIKNFENKYGKPNKTILVVGDYDKGDNNMKGKEPTICKKFRRIFRNAGYKTYLVNEFRTSKLCNCCNEEIEKFLKKPSKKPKRKGEIDLCHGILRCKSVKHNCEIYHNRDKNAVQNMLKIVKSIFNTGKRPEVFCRSS

SEQ ID NO: 4888 - protein, 577 aa, Klosneuvirus KNV1
MVINVKRPPNIYYYKLYLNLVFDSDIVTFHDHIPIKFTLLTEFKTYNQQCDKVPFIPSIINKIIRYNANYNYSVKEIIKIFNVFRKKNLEFIPSLIKVCSKDLLCIPFWNAYTKLLSDKLYLPTLNDLVKTINKTLDNSWFKANEFVNNKNAYKLNFKKVNYEECILTKTRKINIYFNKSQKKYMRQIIGIYRYFYNRCVSFLNNYDKKTRISKYYINSKNKMSLIIVKVPETINPYSFISMRPILKQHIPTWLLKDFPEHLIDQALNEAFVRFKICLDRCIKTGKQFEFKYKQSKENVHTINLEKSMIHKTNSLFRNWKINDNYLFRNLKTSERFHMYNFKGSTLSYHRILKKYTLNLSYEEKTYKHYIPHRIGAGDPGQRTFLTIYSTDKVIEVGNNGCNKLFNICKEIDIIQSRLNCKEYYTQINNEKIIYKMNHNRRRNLKKALHNKIQYLKNLKTELHNKSIKYICDNYSTIILPPYEIQNMVGKLHSVIARGMYNLAYYTFREKLVAKSKEYNIKVLIKPEYYTTKTCGQCGILNHNIGTNKVFNCPICKLEMGRDQNAARNNLLRNIKYT

SEQ ID NO: 4889 - protein, 511 aa, Klosneuvirus KNV1
MCQWYKKNVKKLSDNLWLPLITDEIDYKPKYSFTQTTSINFEAKTNKNLIKNNIDYVSNQNDIKTYMEHFNKKINKINDSNLNNDEKKKKKIKLYDEQIKMFEHYNDVIKTTQIHLNLNKEQKSTIENWLIECDNVYNYCVKKYNDNPYSFDINYKSLKLEVFNQLYGTNKKPCPYDMLTDEVRIFCSNLKSCQSNLANGNIKHYTMKRRNTIYSQSILIPKNSITKTGIFPSFLGDIKGFKLDSEYANCDSRLLIDKIHKKYILCIPQYQKKFFEKQTEKIINNIEYKQIYDKEINEIGAIDLGERIPFTIYSENHYVKIGEDIRKNILDYQMRIRQMQRALSKNINKNNKRLMNKKKLKLKIRLTYGHIKNLVKELHNQTANYLVKNYKKILIPEFRTQEMIKNVNSTDNKQKARVNKLDKRVKFVLLMLSHYRFRQHLTNKCVEYGCQIDVVTEEHTSMCCTNCGSLSKKYNGREKHCDKCGYKINRDVNGARNILLKNARQHIKLRL

SEQ ID NO: 4890 - protein, 359 aa, Klosneuvirus KNV1
MNYKSLKLEVFKQLYGTNKKPCPYDMLTDEVRIFCSNLKSCQSNLANGHIKHYTMKRRNTNYSQSILIPKNSITKTGIFPSFLGDIKGFKLDSEYANCDSRLLIDKIHKKYTLCIPQYQKKFFEKQTEKIINNIECKQIYDKEINEIGAIDLGERIPFTIYSENHYVKIGEDIRKNILDYQMRIRQMQRALSKNINKKNKRLTNKKKLKVKIRLTYRHIKNLVKELHNQTANYLVKNYKKILIPEFKTQEMIKNINLTDNKQKARVNKLDKRVKFVLLMLSHYRFRQHLTNKCVEYGCQIDVVTEEHTSMCCTKCGSLSKKYNGREKHCDNCGYKINRDVNGARNILLKNAKQHIKLRL

SEQ ID NO: 4891 - protein, 663 aa, Klosneuvirus KNV1
MSVVEETKKKPPDYFKCVKIPIKHVLKNPDTNSPKITNGVIKSNKIIIHTLLFMKLYLLNYYEKNNKLPIIDKVFVNSCMKILCNENANGRPPKKEVKELKDTLTKFYNKEYKPLIQNDPLDYTHLNTVLDYLTVDIITMYENNIKLHYVEYVERYVNVMWKKKDTINKIKEDNKDETTQKELINEFCRQLRKIKLDILETTDKLTSDDKYHQWIQDKKKLITPNKAKYNKDNLYYDLQCNPQNYLQCMIKMMKEIEKEGVTINNVFPMRNTVTPHHIRLDTTTLVHLLFTSKQGNKTDYLLDGNLKKHENDIWKFFFRTERQCFKKPNYTFHHMIETDGVSCSILFIRNDLIGKRIPSNKIGTSEQYIDELADYSDLKNKKIVAIDPGKSDLLYCVDSDDKNANEFRYTQDSRRKECKIKKYAKIILEFKKEKIGNKTITQYETELSKLNRKTLDIKEFKKYIKKKCDINHKLFKFYEKYIFRKLKLNGYLNRKKNEQKMINNFKKIFGKPDNTIICIGDFEQKTHMKYKEPTKGIGLRKLLKQAGYKIFLVDEFRTSCKCSKCGGGTCEKFLTRKNPKPYKSGNMLVHGLISCKNCSNVWNRDVNGATNIYKIAKNAINGIERPKYLCREKKDEEVKQVKKKVVQKKQVKKSVRVDALTKS

SEQ ID NO: 4892 - protein, 799 aa, Klosneuvirus KNV1
MNKHISIKVKLEKLLWKKMNYDNLYDAITRTNILIDNGSLFIRSYILYVIEYNKNNEEKISEPIVDIDFIRMAFSIISNDDSPKKGRPFNENKTYLLNQLKTYFAIFKEKTNMEITNANKLSYILGQTYEQIYISIINNIIYHFDKHVWKFIKASNLSEYGSIKIANDSNKLTEFYSEMAKIKNDLFNNSLTSNIKYHDWINSIRQFIIPYTYIETKFETDVNKNTFSYLKCMQYINNYIQSKDLKSYQIFPLKTSCYNNHVKINTSALIDLFYGSSKLNELTKYDYLSITGDTKFQEKVWNDIFHFKNTMGKYMYKHTNYSFNYEIETDGFAVSLNFIQNNEIENKEKRKKNFKLARQKTNLNKQNKTKTEYDIDLKIKQDNKLQSKEDQLKTTKQRTLDSKKEFKKLSKEDQEKLKNKLNDKNEFPYIDKVLMDEDKRKLFEEDFINGNLIYCDPGKRSPLYLMASNNKIHMKEKELVTNNFGVSIWNNHKIMNYTNNTRQLFFKKKEYSKLIENWKKNNSSKKFRAEIKKIFNNEYETFEELEEVILYNIKSLKEMEIELSNCNKKSCIHDEFLKYVIKKLEYNNKVKKQYDTSYLEKLNWYTYLNKNKHENELLNQIENEFGKDIKIIIGDWSGKGCVKYMSTPNISLKRKLAERFKVYLIDEYLTSKIHYNHKIRCENLKIKSEEKEVNSYQSNKQFNTSFKRLHSILTYKIVKEEMGCKKIEMGCINRDKNSVLNMETIVKGLLENGKRPDIFSRKETNHYDRKVNHNDARGTNRRNEKLIKQIESDTKNKSI

SEQ ID NO: 4893 - protein, 209 aa, Acanthamoeba castellanii
SPRVSSRKIVGIDPGLEISFTVYSENETQSICPIEIVVNTTKNEYKKIDKINEIIKTKPNLNSKRKKKLNRGLRKYHRRVTNKMKDMHYKVSHELVHTFDKICIGKLNVKSILSKANTVLKSALKRKLATLSFYRFTQRLTHMGYKYGTEVVNVNEYLTTKTCSNCGKIKDLGASKIYECESCGMYADRDENAAKNILKVGLKPWYKQK

SEQ ID NO: 4894 - protein, 238 aa, Acanthamoeba castellanii
MIDKTVTLQYDSDTRKYILFVPRVTPKYSVNKEKNSCGIDPGLRDFLTVYSENETQSICPIEIVVNTTKNEYKKIDKINEIIKTKPNLNSKRKKKLNRGLRKYHRRVTNKMKDMHYKVSHELVNTFDKICIGKLNVKSILSKANTVLKSALKRKLATLSFYRFTQRLTHMGYKYGTEVVNVNEYLTTKTCSNCGKIKDLGASKIYECESCGMYADRDENAAKNILKVGLKPWVQTKIV

SEQ ID NO: 4895 - protein, 521 aa, Acanthamoeba castellanii
MKEAVKTVKPKVPAKKRIITGSKTKKKVFVKKKQPAKKPPDKKPVKKIVKTDKPKSIYVPNKDLKISKWIPIPKKEFIEIETNSWYEHRKFENPNKSPVQTYNKIVPVVPPESIKQQNLANKRKKTNKSIVFISSEKIRIYPTRDQQKILQTWFRLFAYMYNSSIDYINSKKVVLESGRINVTATRKVCNKISVRKALKTTRDNLIQSTNPSIMTHIMDEAIGLACSNYKTCLTNYIEGQIKKFDIKPWSISKRRKIIVIEPGYFKGNSFCPTVFPKIKSSKPLTMIDKTVTLQYDSDTRKYILFVPRVTPKYSVNKEKNSCGIDPGLRDFLTVYSENETQSICPIETVVNTTNNEYNKIDKINEIIKTKPNLNSKRKKKLNRGLRKYHRRVTNKMKDMHYKVSHELVHTFDKIYIGKLNVKSILSKTNNVLKSTLKRKLATLSFYRFTQRLTHMGYKYGTEVVNVNEYLTTKTCSNCGKIKDLGASKIYKCESCGMYADRDENAAKNILKVGLKPWYKQK

SEQ ID NO: 4896 - protein, 527 aa, Acanthamoeba castellanii
MKEAVKTVKPKVPAKKRIVTGSKTKKKVFVKKKPPAKKPPDKKPLKKTTKKTVKKVINRPKSIHIPNKDLKIFKWIPTPKKEFTEIETNSWYEHRKFENPNGSPIQSYNKIVPVVPPESIKQQNLANKRRKTNKPIVFISSEKIRIYPTKEQQKILQTWFRLFACMYNSSIDYINSKKVVLESGRINVAATRKVCNKISVRKALKTIRDNLIQSTNPSIMTHIMDEAIGLACSNYKTCLTNYIEGQIKKFDIKPWSISKRRKIIVIEPGYFKGNSFCPTVFPKMKSSKPLIMIDKTVTLQYDSDTRKYILFVPRVTPKYSVNKEKNSCGIDPGLRDFLTVYSENETQSICPIETVINTTKNEYNKIDKINEIIKTKPNLNSKRKKKLKRGLRKYHGKVTNKMKDMHYKVSHELVHTFDKIYIGKLNVKSILSKANTVLKSALKRKLATLSFYRFTQRLTHMGYKYGTEVVNVNEYLTTKTCSNCGKIKDLGASKIYECESCGMYADRDENAAKNILKVGLKPWYKQK

SEQ ID NO: 4897 - protein, 520 aa, Acanthamoeba castellanii
MKEAVKNVKPKVPAKKRIITGSKTKKKVFVKKKPPDKKPLKKPVKKTVKTDKPKSIYVPNKDLKISKWIPTPKKEFTEIETNSWYEHRKFENPNKSPVQTYNKIVPVVPPESIKQQNLANKRKKTNRPIVFISSEKIRIYPTKDQQKILQTWFRLFAYMYNCTIDYINSKKVVLESGRINVAATRKVCNKISVRKAQKTIRDNLIQSTNPSIMTHIIDEAIGLACSNYKTCLTNYIERHIKKFDIKPWNMSKRKKIIIIEANFFKKGTFCPTVFPKMESSKPLTMIDKTVTLQYDSDTRKYILFVPRVTPKYSVNKEKNSCGIDPGLRDFLTVYSENETQSICPIEIVVNTTKNEYKKIDKINEIIKTKPNLNSKRKKKLNRGLRKYHRRVTNKMKDMHYKVSHELVNTFDKICIGKLNVKSILSKANTVLKSALKRKLATLSFYRFTQRLTHMGYKYGTEVVNVNEYLTTKTCSNCGKIKDLGASKIYECESCGMYADRDENAAKNILKVGLKPWYKQK

SEQ ID NO: 4898 - protein, 545 aa, Acanthamoeba castellanii
MAKTTNGKFWNDECEKVSDLLWKPNLIVNHKPQERINFKCDNKYITFNYYSNNVPINDQLKFKDIPQSNNTDKKNKLMDKLLKIEDSRYKKDIESNKTRKIKLTKEQLTAKHNTQLLKIQNKISQLDGFIRSRRIQLLPNDFQKNIFNIWFNETTVIYNRLLTEFTQYYIKFKEIASDNKELVKLLRTNEEFPLSLQKLRNLKIHDIINIYLEDQLIHKLETPFCVIANTIKEFVANVKGNLTKLAENKIDKFTFKHKNFNGKIRTISIDSKYASENSFYPDKLGKLLQTYEDLKGFSWKNVKHDFKIVYDKYNNKYYAHIPKYVYRNLNILNKKPITVMDPGERTFQTLYGLDHVISIGDNLRETISKRLLRIDNLKSKLDTPGSKKHNLKLNRKTRVRKCRYKKAIDRHHKKIEHLQRELHYKTAIYLCENYQRIMVTDFSSKKVSSKDGDLDAMSKRILGKISHYRFRQRLQQKCEEFNCQYLEVNEAWTSKTCCNCGYIHAKLGTSKIYDCPKCKQKRDRDVNGAINILLKNRKLVLMEDQ

SEQ ID NO: 4899 - protein, 482 aa, Acanthamoeba castellanii
MVYNQDLSISNKTCGISDWLPPVRNKKISDIKSNSWFDIRRCLNPNIKTKFVPVNNKQIVLKEPNCIYLKYDLITLNPSSDHIRILREWFSLYAKIYNYAINLIRKMFYVNNKLIKSRLQCEIYDEIIIRKLSNDKTKLIESLKLSDRPPEFLLDYAISHACTYCNSQVKKYLKDSKNPYNKKTLRFRLWSLHKSRRVMHILPPKLCDKNVCNGLFLKLNPSKNIHDIYMFCVMSWDRLTGKFFVYKPVLKRLINIPKKQFTRCGIDPGVRTFLTLYSSERTYDVCDSTFYNNKIKRMWRKIDRINFLLHNRKKRKKRKNDRRLRKSLAKYYRKIRQRIKDLHTKTAKYLVSRYKEIYIGIYDTSKNLSDPRISFYEKRRIATLNHELFLTKLQQVADRFGSSVFAINEHMTTKTCSKCGRINEIGSSKVHKCACGMYAGRDENAAKNILKKGIKEHYLSAQSDKNVTEYNNKKSNNTNKET

SEQ ID NO: 4900 - protein, 545 aa, Acanthamoeba polyphaga mimivirus
MAKTTNGKFWNDECEKVSDLLWKPSLAVNHKPEERDNFKCDNKYITFNYYSDNVLINNKLKFKDIPQLNNTEEKNKLMDKLLKIEDSRYKKDIESNKIRKIKLTKEQLTAKHNTQLLKIQNKIGQLDGFIRSRRIQLLPNDFQKHVFDIWFNETTVIYNQLLTEFTQYYIKFKEIASDNKELVNLLKTNTEFPLSLQKLRNLKIHDIINIYLEDQLIHKLETPFCVIANTIKEFVANVKSNLTKLAENKIDRFTFKHKNFNRKIRTISIDSKYVSENSVYPDSLGKLLQTYEDLKGFSWQNVEHDFKIVYDKYDSKYYAHIPKYVYRNPNVLNKKPIVVMDPGERTFQTLYGLDHVISIGDNLRETISKRLLRIDSLKSKLDTPGSNKYNLKLNRKTRVRKYRYKKAIDRHHKKIEYLQRELHYKTAIYLCENYQRIMVTDFSSKKVSSKDGDLDTMSKRILGKISHYRFRQRLQQKCEEFNCQYLEVNEAWTSKTCCNCGYIHAKLGTSKVYDCPKCKQKRDRDVNGAINILLKNRKLVLIEDQ

SEQ ID NO: 4901 - protein, 479 aa, Acanthamoeba polyphaga mimivirus
MVHNQDLSISNKSCGISDWLPPIRNKKTSDIKSNSWFDIRRCLNPNIKTKFVPVNNKQIILKEPNCIYLKYDLITLNPDLGHIRILREWFSLYAKVYNLAINLIRKMFYVDNKLVESKLQHEIYDEIIVRKLSNDKIKVIESLKLSDRPPEFLLDYAISHATMYCNTQVKKYLKDSKNPYNKKKLRFRLWSLHKSRRVMHIFPPKLCNKDVCNGLFLKLKPSESIHDIYMFCVMSWDRLTGKFFIYKPVLKQLVNIPKKQFIRCGVDPGVRTFLTVYSSERTYDVCDSTFYNNKIKRMWRKIDRINFLLRNRKKRKKRKNDRHLRKSLAKYYRKIRQRIKDLHIKTAKYLVSRYKEIYIGIYDTSKNLSDPRISFYEKRRIATLNHELFLTRLQQIADRFGSSVYAIDEHMTTKTCSKCGRINEIGSSKVHKCECGMYAGRDENAAKNILKKGIKEHYLSAQSDKNATEYNNKKSHKII

SEQ ID NO: 4902 - protein, 464 aa, Acanthamoeba polyphaga mimivirus
MKIEDTRYKKDIESNKTRKIKLTKEKLTAKHNTQLLKIQNKIGQLDGFVRSRRIQLLPNDFQKHILNIWFNETTVIYNQLLTEFTQYYLKFKEMAKNNKELVNLLKTNTEFPLSLQKLRNLKIHDIINIYLEDQLIHKLETPFCVIANTIKEFVANVKGNLTKLVENKIDRFTFKHKNFNRKIRTISIDSKYVSENSVYPDKLGKLLQTYEDLKGFSWQNVEHDFKIVYDKYDSKYYAHIPKYVYRNPNVLNKKPIVVMDPGERIFQTLYGLDHVISIGDNLRETISKRLLRIDDLKSKLDTPGSKKNNLKLNRKTRVRKCRYKKAIDRHHKKIEHLQRELHYKTAIYLCENYQRIMVTDFSSKKVSSKDGDLDSMSKRILGKISHYRFRQRLQQKCEEFNCQYLEVNEAWTSKTCCNCGYIHAKLGTSKVYDCPKCKQKRDRDVNGAINILLKNRKLVLIEDQ

SEQ ID NO: 4903 - protein, 521 aa, Acanthamoeba polyphaga mimivirus
MKEAIKTVKPKIPAKKRIITGSKTKKKVFVKKKPPAKKPPDKKSVKKSVRTDKPKSIYVPNKDLKMSKWIPIPKKEFTEIETNSWYEHRKFENPNKSPIQTYNKIVPIVPPESIKQQNLSNKRKKSNKPIVFISSEKIRIYPTKDQQKILQTWFRLFASMYNSTIDYINSKKVVLESGRINVTATRKICNKISIRKALKTIRDNLIQSTNPSIMTHIMDEAITLACSNYKTCLTNYIEGHIKKFDIKSWSISKRRKIIVIEPGYFKGNSFCPTVFPKMKSSKPLTMIDKTVTLQYDSDTRKYILFVPRVTPKYSVNKEKGSCGIDPGLRDFLTVYSENETQSICPIETVVNTTKNEYKKIDKINEIIKTKPNLNSKRKKKLNRGLRKYHRRVTNKAKDMHYKVSHELIHTFDKIYIGKLNVKSILSKANTVLKSALKRKLATLSFYRFTQRLTHMGYKYGTEVVNVNEYLTTKTCSNCGKIKDLGASKIYECESCGMHADRDENAAKNILKVGLKPWYKQK

SEQ ID NO: 4904 - protein, 482 aa, Acanthamoeba polyphaga mimivirus
MVYNQDLSISNKNCGISDWLPPIRNKKTSDIKSNSWFDIRRCLNPNIKTKFVPVNNKQIVLKEPNCIYLKYDLITLNPSSDHIRILREWFSMYAKIYNHAINLIRKMFYVNNKLIKSRLQCEIYDEIIVRKLSNDKTKLIESLKSSDRPPEFLLDYAISHACTYCNSQVKKYLKDSKNPYNKKTLRFRLWSLHKSRRVMHIFPPKLCDKDVCNGLFLKLKPSKNIHDIYMFCVMSWDRLTGKFFVYKPVLKRLSNIPKKQFTRCGIDPGVRTFLTLYSSERTYDVCDSTFYNNKIKRMWRKIDRINFLLHNRKKRKKRKNDRRLRKSLAKYYRKIRQRIKDLHTKTAKYLVSRYKEIYIGIYDTSKNLSDPRISFYEKRRIATLNHELFLTRLQQVADRFGSSVYAINEHMTTKTCSKCGRINEIGSSKVHKCACGMYAGRDENAAKNILKKGIKEHYLSAQSDKNVTEYNNKKSNKTNKET

SEQ ID NO: 4905 - protein, 529 aa, Acanthamoeba polyphaga mimivirus
MIHNHKIIMKEAVKTVKSKVPAKKRILTGSKTKKKIFVKKKPPVKKPPDKKPVKKTVKTDKPKSIYVPNKDLKMSKWIPTPKKEFTEIETNSWYEHRKFENPNKSPVQTYNKIVPVVPPESIKQQNLANKRKKSNKPIVFISSEKIRIYPTKYQQKILQTWFRLFASMYNCTIDYINSKKVVLESGRINVAATRKICNKINVRKALKTTRDNLIKSTNPSIMTHIMDEAIALACSNYKTCLTNYIEGHIKKFDIKPWSMSKRRKIIVIEPGYFKGNSFCPTVFPQMKSSKPLTMIDKTVTLQYDSDTKKYILFVPRVTPKYSVNKEKNSCGIDPGLRDFLTVYSENETQSICPIETVVNTTKNEYKKIDKINEIIKTKPNLNSKRKKKLNRGLRKYHRRVTNKAKDMHYKVSHELVHTFDKIYMGKLNVKSILSKANTVLKSALKRKLATLSFYRFTQRLTHMGYKYGTEVVNVNEYLTTKTCSNCGKIKDLGANKIYECEFCEMHADRDENAAKNILKVGLKPWYKQK

SEQ ID NO: 4906 - protein, 527 aa, Acanthamoeba polyphaga mimivirus
MKEAVKTVKPKVPAKKRIVTGSKTKKKVFVKKKPPAKKPPDKKPLKKTTKKTVKKVINRPKSIHIPNKDLKIFKWIPTPKKEFTEIETNSWYEHRKFENPNKSPIQTYNKIVPVVPPESIKQQNLANKRKKTNRPIVFISSEKIRIYPTKEQQKILQTWFRLFACMYNSSIDYINSKKVVLESGRINVAATRKVCNKISVRKALKTIRDNLIKSTNPSIMTHIMDEAIGLACSNYKTCLTNYIEGQIKKFDIKPWSISKRRKIIVIEPGYFKGNSFCPTVFPKMKSSKPLIMIDKTVTLQYDSDTRKYILFVPRVTPKYSVNKEKNSCGIDPGLRDFLTVYSENETQSICPIETVINTTKNEYNKIDKINEIIKTKPNLNSKRKKKLKRGLRKYHGKVTNKMKDMHYKVSHELVHTFDKIYIGKLNVKSILSKTNNVLKSTLKRKLATLSFYRFTQRLTHMGYKYGTEVVNVNEYLTTKTCSNCGKIKDLGASKIYKCESCGMYADRDENAAKNILKVGLKPWYKQK

SEQ ID NO: 4907 - protein, 698 aa, Bodo saltans virus
MKKPKVKEKEKEKEKENFDFMKTNKGNIHKLIKDKMVLSIIDELVVRVNKIVIHAYQFNKLFCSYLYNNHFPLPFLDKEYICDIFRVITKRKCGKGGYTEDKMPVQLKILNDFYKNHYSKLVQPTEILYYDGLSYILAYEAIDIITNINNNIEMHFIDHLNKYVNIVFNVKQQAEQITNNNKDKTIRKELHKKLYDEFRKVKNDLISFSDEFTSDKKYHKWIIQQRSSIFKDKIEFEKNSIYYDIKVNTQDYLYSMFYIANEFEKMNEKINNDNEINNTNNKLIRLFNVLPLRKSNIPKHITIDTCGLIQNFMGNESTTKLLQNYSKENKFYELWNRFFMLNKRAFKKEKGKYIFNNMIRTDGISCCVLFVHVDKNGKPMKKTFQNKNSDDEMNTDYIEKATITDEMRKMQKVAADPNLADLIYCGARDNDGNLKTFRYTQNQRRLETRNKKYNKIIDNMNKHTLLPVNKKIIDEFNNKENKKIDVVLKILKINKLSIKELESILSEHNSKTINYDKLNKYISKKNEVNNIMKEHYEQKVFRKLNLNRFINTQKSESKLIKNFIKVFGNPKDVIFIMGDYDKGSYNMKRKEPVICKKFRRIFKNAGFMTFLINEFRTSMLCNGCKGELEKFMKRLSHKPKMYKEGKEELVHGLLRCQSIKHECEIYHNRDKNSVQNMLNIVEYIFKHGIRPKEFSRTE

SEQ ID NO: 4908 - protein, 702 aa, Bodo saltans virus
MKKPKEKIKVKDKENFDFMKTNKDNINNVIKDTTILPIIDELVNRVNKIVIHAYQFLKLQCIYLFKNNQSFPIIDKKYICDIFKVITKRKCNFGAYTENNMPEQMKTLNDFFKNHYSKLITVDEILYYDKLSYILAYEAIDMVTNINNNIEMHFIDHLNKYVNIVFDVKNKADQITKDNKNKIIRKELHKQLYDEFKKVKNDIIAFGEFTSDKKYHDWIKDQKLKLFGSKTKFEKDSIHYDLKSNTQDYLKSMFHIANELEKINDKIMENNEKNGTENKQIRLFNVLPLRKNIVPKHITIDTCGLIQNFLGEESTSEHLKNYKKNNEYHILWDRFFDLKKRTFKKNKYTFSHMIKTDGISCCILFVRIDVNGKALKKTFQNKQCSEEINTDYIENTVITEEMKQMKPVCTDPNYGDLIYCGAKDENGNLQTFRYTQNQRRLETRNKKYNKIIDSINKSTEISVNKNLIGEYNVIVKNHNENIKKSNNKKIKEKKEKVDKLTIKELETILSKFNSKTNNLDKINKYVSKKNEINKILNEHYAQKVFRKLQLNIFINTQRSESKMIQNFIKVFGNPEDTIFIIGDYDKGSYNMRGKEPAICKKFRRIFKNDGFMTFLINEFRTSMLCNECCEELEKFHKRLSHKPKLFKEGKSELVHGLLRCQSVKHECEVIHNRDKNSVQNMLNIVKSIFETGFRPKKFSRTE

SEQ ID NO: 4909 - protein, 826 aa, Bodo saltans virus
MILKKGKDYKPSLDNEQYEKLFNFYINTFSQYYFNPNGKDKLICSERIDQIMKLNLKNTLTNFDNNIIYSHEKYINRFIKCYLNNVFKNKLEYNRQIKKASTYEMIKRHNKTDLCGNKIVNVMDFYLDFFKMQKKYNIDYDDRVLKQFNTYLGEKIEKKYIIRSANNFFKEDLDKIKAFEENLSEYKKRIKKILIENEPINENDPQFIKDIITIKNSIIPTIVKSYKDDLKKNPYNFIGGMIYINNYLEKIQSKTFNVFPTRKNFIPRNIIIDATSMNVAFCKNSFKNITNNKLEIYKTIFSFPDNYYKLNGYVFSGTIHTDGVSISLIFETDEKYKESLKVKKIKNDAKNIELRNKKNAEDKLYKEYNIVEIQNFIKNNEKILKNLKEKIDEDEIFKVSSSIDESKRMLDEFNKEIKKRMNKYINDTRKEKEEKNLNKEEKKDKKKEEDKKEYVKKIKKLKEESEGDELRKINRKGKEFYYLDDLTEEELKKVEKSKKMYIDQGKINLIYVLIEKDGKDVFIKYSGKERAFNLKTKEHIKNMKKMYLNYGITKEQQESIEINKKSSNAETIKSNMEQINKTFMATYEKYLNEKLRKEKLEIYIDKQKAEKSLINKIVKQLGLTNINELKEYTLIIGDWKGNNSLKNSKSTLGIGMKRLLKKYVKEMYLIDEYNTSKICNMLHEEEVKTEEKIMELKSISKKGEVKIISKKMHEILTFKMQKQRILCKKNFIYDDTNEEKVTIEGKDIIQINRYIQRDKNAVLNFRTILSHYILNNRERPKAFVRSEKSTCRGSKPRKATVAKESYSSSIGEPKKLKKKKAKKVKT

SEQ ID NO: 4910 - protein, 657 aa, Bodo saltans virus
MMRRFIPRTSDNEFIVLADNISTYSTHYVDISTIPAYSTNIKTNSWFTNLCSNYSLPYHKPSFNFSKCENVVPNRKTIKINMNLNNRQKLILDKWFHSSNLMYNQTIIFLRKHISYCSIQNYNSLHKLMPKYYENCKNIKNTQHILYKKQMLYSSVLVKLEKLYITDNKTKKEYSQIITLKKKISEINIQITKLNIELDTYSKKNIDLSKQYHNYVQLEKHINTFLSYEHIRTKYLKKIRDNIALKYSCYNDDRKYKIHTHSLDGAIKQACAHYKTCITNLLDGNIKRFRVRCRNSDNPKKLVEIDSESFNGSENDYCICKKILGNIDYTYNNNKYTLSTKQTSTIYFDGSKYTLLMPIYIEKPFATVRKPYTALDGGVRDFLTGFDNNSLKNYGHNVANVLYKYFNKIDKLKSVSYMGDNTNLLNYKNKLMSKKNYLEDVYICDKLEEIEEQLKYKSTSIEKIIENCKRIIKNNEKLINVSKDKNKIIKLYASINFNKYRIEKLSKMNEKEREKYTKYINYKKANKVQFLNKKIKWKIDELHWKIARELCENYEMIILGKLDTQSILKNKDLNKGTKRVLQSLSHYKFRERLVYKALSLGCKIIVQNEKYTTKTCTLCGHYNEWVTTEHSIDCKGCKKTYNRDNNGARNIFLKSLI

SEQ ID NO: 4911 - protein, 835 aa, Bodo saltans virus
MILKKGKDYTPSLDNEQYEKFFNFYINTFSQYYFNPNGKDKLICSERIDQIMKLNLKNTLTNFDNNIIYSHEKYINRFIKCYLNNVFKNKLEYNRQIKKASTYEMIKRHNNTDLCGNKIVNIMDFYLDFFKMQKKCNIEYDDRVLKQFNTYLGEKIQKKYIIRSANNFFKEDLDKIKTFEENLSEYKKHIKKILIENEPINENDPQFIKDIITIKNSIIPTIVKSYKDDLKKNPYNFIGGMIYINNYLEKIQSKTFNVFPTRKNFIPRNIIIDATSMNVAFCKGSFKNITNNKLEIYKTIFSFPDNYYKLNGYVFSGTIHTDGVSISLIFETDEKYKESLRVKKIKNDAKNIELQNKKNAEDKLYKEYNIVEIQNFIKNNEKILKNLKEKKDEDEIFKVSSSINKGKKMLEEINIEIKKRMNKYINDTRKEKEEKNLNKEEKKDKKKEEDKKEYVKKIKKLKEESEGDELRKINRKGKEFYYLDDLTEEELKRVEKSKKMYIDQGKINLIYVLIEKDGKDVFIKYSGKERAFNLKTKEHIKNMKKMYLNYGITKEQQESIEINKKSSNAETIKSNMEQINKTFIATYEKYLNEKLRKEKLEIYIDKQKAEKSLINKIVKQLGLKNIDELKEYTIIIGDWKGNNNLKNSKSTLGIGMKRLLKKYVKEMYLIDEYNTSKICNMLHEEEVKTEEKIMELKSISKKGELTVISKRMHEILTFKMDKKIQLKMQKQRILCKKNFIYDDKKNEVKKFLHNNKNEEKVIKEGKKVIQINRYIQRDKNAVLNFRIILSHYISNNRERPKAFVRSENESKNKKSTCLGGKPKIATVVKKASVAV

SEQ ID NO: 4912 - protein, 657 aa, Bodo saltans virus
MMRRFIPRTSDKEFIVLADNISTYSTHYVDISTIPAYSTNIKTNSWFTNLCSNYSLPYHKPSFNFSKCENVVPNRKTIKINMNLNNRQKLILDKWFHSSNLMYNQTIIFLRKHISYCSIQNYNSLHKLMPKYYENCKNIKNTQHILYKKQMLYSSVLVKLEKLYITDNKTKKEYSQIITLKKKISEINIQITKLNIELDTYSKKNIDLSKQYHNYVQLEKHINTFLSYEHIRTKYLKKIRDNIALKYSCYNDDRKYKIHTHSLDGAIKQACAHYKTCITNLLDGNIKRFRVRCRNSDNPKKLVEIDSGSFNGSENDYCICKKILGNIDYTYNNNKYTLSTKQTSTIYFDGSKYTLLMPIYIEKPFATVRKPYTALDGGVRDFLTGFDNNSLKNYGHNVANVLYKYFNKIDKLKSVSYMGDNTNLLNYKNKLMSKKNYLEDVYICDKLEEIEEQLKYKSTSIEKIIENCKRIIKNNEKLINVSNDKNKIIKLYASINFNKYRIEKLSKMNEKEREKYTKYINYKKANKVQFLNKKIKWKIDELHWKIARELCENYEMIILGKLDTQSILKNKDLNKGTKRVLQSLSHYKFRERLVYKALSLGCKIIVQNEKYTTKTCTLCGHYNEWVTTEHSIDCKGCKKTYNRDNNGARNIFLKSLI

SEQ ID NO: 4913 - protein, 626 aa, Bodo saltans virus
MKKKPDKIYRIIKVPLDYVFRNIYSYEYKVLQENIIKCNKIFTYSLEFLKLYCLHSYEINNIFPTINSNLIRCILNIITTNPRVTTNEKKEITEFKIILMKIYNEHFKDEYIDINICSTGLKTLFEYMIIQILTIYENNIKLHYCDYVKRFINWFCNKKRFIEHYQKTKNKIGEKTFIANLKKIHYDVLNVNIDDNSYKTNVAFHDLVKIIKSIVLPKKTFIKSLYYDLECEPLKYLENMHIMMLIINNDNKCIYNVYPLRTSIIPKYMKLDTTTLINLLMETDKSHYLREGNLVKLADESWNKFFKLDNKVFKLKGYKFDHSILTDGVGCSIQFIKEEYYNKFVPNKKKITETYEYIDELEKEDYKRLKEKQIVAIDPNKGDLIYCVDGIEKERNQFRYTQDQRRKELKIKKYKKIREKLKKEEIIDGKTVEEWEAELSEKNRKELKFAEYKIYLKEKHKLNKKLEEFYEKRLFRKLNLNGYLNKKQSDQRMIKNFKEKFGESEKVVICIGDWSEKEQMKNKEPTKGKGMRKTFEENGFELYLVNEYNTSCKCNVCEGECKIFCKGENPRPWKNNKIPIHGLLKCKTCKVLWNRDENSSCNIYKISKLAIEGKQRPLYLTNKMDK

SEQ ID NO: 4914 - protein, 657 aa, Bodo saltans virus
MMRRFIPRTSDNEFIVLADNISTYSTHYVDISTIPAYSTNIKTNSWFTNLCSNYSLPYYEPSFNFSKCENVIPNRKTIKINMNLNNKQKLILDKWFYSSNLMYNQTIIFLRKHISYCSIQNYKSLHNLMPKYYENCKNMKNTKHILYKKQMLYSSVLVKLEKLYITDNKTKKEYSQIITLKKKISEINIQITKLNIELDTYSKKNIDLSKQYHNYVQLEKHINTFLSYEHIRTKYLKKIRDNIALKYSCYNDDRKYKIHTHSLDGAIKQACANYKTCITNLLDGNIKRFRVRCRNSDNQKKLVEIDSESFNGSENNYCICKKILGNIDYTYNNNKYTLSTKQTSTIYFDGSKYTFLIPIHIEKPFATVRKPYTALDGGVRDFLTGFDNNSLKNYGHNVANVLYKYFNKIDKLKSVSYMGDYTNLLNYKNKLMSKKNYLEDVYICDKLEEIEEQLKYKSTSIEKIIENCKRIIKNNEKLINVSNDKNKIIKLYASINFNKYRIEKLSKMNEKEREKYTKYINYKKANKVQFLNKKIKWKIDELHWKIARELCENYEMIILGKLDTQSILKNKDLNKGTKRVLQSLSHYKFRERLVYKALSLGCKIIVQNEKYTTKTCTLCGHYNEWVTTEHTIDCKGCKKTYNRDNNGARNIFLKSLA

SEQ ID NO: 4915 - protein, 625 aa, Bodo saltans virus
MKKKPDKIYRIIKVPLDYVFRNIYSYEYKVLQENIIKCNKIFTYSLEFLKLYCLHSYEINNIFPTINSNLIRCILNIITTNPRVTTNEKKEITEFKIILMKIYNEHFKDEYIDINICSTGLKTLFEYMIIQILTIYENNIKLHYCDYVKRFINWFCNKKRFIEHYQKTKNKIGEKTFIANLKKIHYDVLNVNIDDNSYKTNVAFHDLVKIIKSIVLPKKSFIKSLYYDLECEPLKYLENMHIMMLIINNDNKCIYNVYPLRTSIIPKYMKLDTTTLINLLMETDKGHYLREGNLVKLADESWNKFFKLDNKVFKLKGYKFDHSILTDGVGCSIQFIKEEYYNKFVPNKKKITETYEYIDELEKEDYERLKEKQIVAIDPNKGDLIYCVDGIEKERNQFRYTQDQRRKELKIKKYKKIREKLKKEIIDGKTVEEWEAELSEKNRKELKFAEYKIYLKEKHKLNKKLEEFYEKRLFRKLNLNGYLNKKQSDQRMIKNFKEKFGESEKVVICIGDWSEREQMKNKEPTKGKGMRKTFEENGYELYLVNEYNTSCKCNVCEGECKIFCKGENPRPWKNNKIPIHGLLKCKTCKVLWNRDENSSCNIYKISKLAIEGKQRPFYLTNKMNK

SEQ ID NO: 4916 - protein, 644 aa, Bodo saltans virus
MQIDSDGCEENYLCIADYVTNSTINEQLSLKDYNNIFDFMTNISKNVYNTVIFFNDVYYKFKNRMFKNILHLFFIHNTQKITEENIQAQIYYQYDLFYKLYVSSKKNSYNNNKILYPYIKDYICKHNITLMNNNYNHYKNNIIKNIIKEFKFSYSDDNIKHIELISVVETILRSFYNKNWNNTLNEIKNKLPCTINNAEFINQIKKNDKLKNNNNYKEQFNEYAELYKIKGTSDRNIISRFVYKNLGNNKNYLPSNVITEIINKSFNGFILYFSNKEKGIKCSTPKYLKKNDKYSLVYSPQSFKIIGKYVRLTVGEHISKNLNSIVKNKYVLLNENEKTYYKMYVKKKHMKTIDKNTKVPITKNYIVNDNYIDKYDKNIIDGYYLNIRLPKKVHKKSIKNIEINSIQNGLKYKISYSYKHMATTKEEKEITEKNSISIDLGMVNLFSIYDPTGEAKIIKGNQLISLNKFYNKKIDKAHSIAKKANDKEITKKIQKMEINRKNKIDDYFDKIVAWIEKEYSHKENIIIGYNKGWKTNVNLGRKMNRKFYNIPYSRLLKKLKNKFGNRIKITEESYTSKCDALGLEEIKYHDEYLGKRVQRGLFSSSKNKLLNADINGAINIMRKKISLDEIKGEIQNPKVVRLFR

SEQ ID NO: 4917 - protein, 626 aa, Bodo saltans virus
MKKKPDKIYRIIKVPLNYVFRNIYSYEYKVLQENIIKCNKIFTYSLEFLKLYCLHFYEINNIFPTINSNLIRCILNIITTNPRVTINEKKEITEFKIILMKIYNEHFKDEYIDVNICSTGLKTLFEYMIIQILTIYENNIKLHYCDYVKRFINWFCNKKRFIEHYQKTKNKIGEKTFIANLKKIHYDVLNVNIDDNSYKTNIAFHDLVKIIKSIVLPKKSFIKSLYYDLECEPLKYLENMHIMMLIINNDNKCIYNVYPLRTSIIPKYMKLDTTTLINLLMETDKRHYLREGNLVKLADEIWNKFFKLDNKVFKLKGYKFDHSILTDGVGCSIQFIKEEYYNKFVPNKKKITETYEYIDELEKEDYKRLKEKQIVAIDPNKGDLIYCVDGIEKERNQFRYTQDQRRKELKIKKYKKIREKLKKEEIIDGKTVEEWEAELSEKNRKELKFAEYKIYLKEKHKLNKKLEEFYEKRLFRKLNLNGYLNKKQSDQRMIKNFKEKFGESEKVVICIGDWSEREQMKNKEPTKGKGMRKTFEENGYELYLVNEYNTSCKCNVCEGECKIFCKGENPRPWKNNKIPIHGLLKCKTCKVLWNRDENSSCNIYKISKLAIEGKQRPLYLTNKMDK

SEQ ID NO: 4918 - protein, 527 aa, unidentified
  source 1..527: note = Samba virus
MKEAVKTVKPKVPAKKRIVTGSKTKKKVFVKKKPPAKKPPDKKPLKKTTKKTVKKVINRPKSIHIPNKDLKIFKWIPTPKKEFTEIETNSWYEHRKFENPNKSPIQTYNKIVPVVPPESIKQQNLANKRKKTNRPIVFISSEKIRIYPTKEQQKILQTWFRLFACMYNSSIDYINSKKVVLESGRINVAATRKVCNKISVRKALKTIRDNLIKSTNPSIMTHIMDEAIGLACSNYKTCLTNYIEGQIKKFDIKPWSISKRRKIIVIEPGYFKGNSFCPTVFPKMKSSKPLIMIDKTVTLQYDSDTRKYILFVPRVTPKYSVNKEKNSCGIDPGLRDFLTVYSENETQSICPIEIVVNTTKNEYKKIDKINEIIKTKPNLNSKRKKKLNRGLRKYHRRVTNKMKDMHYKVSHELVNTFDKICIGKLNVKSILSKANTVLKSALKRKLATLSFYRFTQRLTHMGYKYGTEVVNVNEYLTTKTCSNCGKIKDLGASKIYECESCGMYADRDENAAKNILKVGLKPWYKQK

SEQ ID NO: 4919 - protein, 420 aa, Tupanvirus soda lake
MKKKKKEKWIPKLSDHYNEIETESWFDIREYQKNPNYHSSMVCFSDRIFIRAEKIILYPNKKQVNILQKWFNLSRKMYNKTTDFLNKKIFINKKISQINVKKYVNFRKLRSNYLKEAKESLCLNNINKHILDQSIARCVAMYKSSLTKIKKKQIKDFRVRKIKKDKRYKTLLIEGCLFSKVKNGFCISVLGEIPSNESLENISETCILSYDKYNSKYTLSVPKYIEPKEYETRNLICGIDPGVRTFLTVYSKEDVYQIGNDIDFNKYFYKIDRLNQICDSKESKQTRKYKRAIGKVYDKINNKVKDMHFKVAKFLCTRYKILKIGNLSTSKIVSNETSVLKESTKRLLYSLSHYKFREKLINQAEKYGVNIKIVSEYLTTKKCSKCEKKNEVGKNKIYKCGKCNLKVDRDINAAKNIRYV

SEQ ID NO: 4920 - protein, 779 aa, White spot syndrome virus
MSASLLTETSLEEEQRREVNNNTSKENDTMEKKTETAATTEKDPEPSVSKRSRNKEPKTTSTVYTSVKCYLSSIIKSESSRSNVTSTKERFEERCKSVSKMMVKGSLFLRLVVDECLRRYNHLEDEIDKWPDMTKDNFYVQLLRKGLDKKKLKEGSTHPVVEDVWNSPIVQETFLSQQGEGNNPIKRHLMDFNTITYAAKQLKTCFETNLRTHFRTRQQRAISGWLAENGFDKKYTKLVQHWIIGCTYKSDWVDSGDLERVKEGTKNFVTLHRKHLCVISDKKNGTISYSPEEKYPIPSILNYYKFLQTEYPQNKKIQKMIVVPKHKLKIHYCTFDQTTIQGICKDLGVWKDMEERHKQSEDILYKQGWYLLFDVKKIKKLRPNWNFHSIQTDGEGVSVLFSREVEEVETVSKKSKKNKKPRGDEDRRNYPPTNAKYVVGVDPGRTNVVSCSVFDTRQKRVVRKHRMTAKQYYQESWMTDRRKANETYKKNNKEYKEALEEITRYDNGEEIINDGNGDTSTPTKKFEAYLKVVNEHYRLLWNEKGKKKYRKNAMKVYSRKQKCISNFIDELIPKRDKIEDYHIAFGDAKFACTGRGEQYASPARIFAKKIKERVGGDKRFTFVDEKYTSKVCHRCNQPLNMLEKDCFSPNKKRKPPTIVTTTTTTTTEEDEENGKWKKATPLRENRDTRRCSSEKTQFGYSSNRKVSTGDISMETPVPSSTSSSFCTPTSITCVLGGKFVDRDFNASTNIVHKFLGFWDKKLMEKKDKMPLKYHFIRVA

SEQ ID NO: 4921 - protein, 464 aa, Faustovirus
MKFNIHKYYQSILNGDIESIFTKRNNEVKDPVCDYKFNNYTKLLSLTTHDEISGIKRNETVEDSVVYETKPLTSPTISVFGKLELDATGFTADDVQCARKIRIYPTETEKSKINKLFSISNAFYNLAIEGIENKTININNKTDIRRKCRVNDDVCNTVHVDAKMAYFDTRSLAAMMAVSNYKAMLTNHQNGNIKHFKLSNKHSTQIVYFSPKDAKLRDDHLCIRDMKLRIRNRDLPWLVEQGINQQISIKRYNRKYYVVVPFKRRSLDNHAKGICAIDPGNRTFATYYSPDEIGKLGVNLIEKVRKINVKIDHLNYIKDTVKLVSRTRHGLKQRIAKLSDKITRLVDYAGWKFAAYLTRRFRVIFVPRLANVVKGGRNSTVNRETRNLRHSEFINKLTHLGKINGCKVVETKEYYTTKTCCRCGIRNDDVGSSKVFSCVNAACKFTIDRDVNGAKNIWLRSLTN

SEQ ID NO: 4922 - protein, 499 aa, Faustovirus
MYKPRKRQIIHENTNNLMNIFLHYKYYYINIISMHLFNEEGNLKVNLQELRKICESEKFQRSETGFWNQNCSIIKDKLLATEFINHDKATDTIISRRIKFKPNYLQRKLLNDCFGAYRWIYNKAIDVIFEVKKYSDKFNCIIDIKLVKKAIYENVKINDDEIPDFIKILPSDSRKEALREAIKNYKTCLTHLNKKLCRRFLLKHKRKDATTFRIKTNAIKLTGNKLVIFKKRILDLIEAGNLNKDLRYATLNNGNLRRLKPYLNASGNPTAYPLINYSHGNYYIIVSGNRKVEQCNVKKEICAIDPGVVNFHTIYDGVVGYEGVKLYETRLEGINQRIDKITQHKQNFTGAKRKRMHLRELKLRAKVSNIVYQFRHTLASKLCNKYKVILLPKLGIKQVAKHLRRQVNRKLYALSHYKFNELIKQIATRTGTTVIHCLESYTSKTCGNCGNLQTCDVDRTFRCRACYYVADRDENACKNILIRSLNNYILSCSSSGKRK

SEQ ID NO: 4923 - protein, 466 aa, Faustovirus
MHLFNEGGNLKVNLQELRKICESEKFQRSETGFWNQNCSIIKDKLLATEFINHDKATDTIISRKIKFKPNYLQRKLLNDCFGAYRWIYNKAIDVIFEVKKYSDKFNCIIDLKLVKKAIYGNVKINDDEIPDFIKILPSDSRKEALREAIKNYKTCLTHLNKKLCRRFLLKHKRRDDTTFRIKTNAIKLTGNKLVIFKKRILDLIEAGGLSENLRYATLNNGNLHRLKPYLNASGNPTAYPLINYSHGNYYIIVSGNRKVEKCNVKKEICAIDPGVVNFHTIYDGVVGYEGVKLYETRLEGINRRIDKITQHKQNFTGAKRKRMQLRELKLRAKVSNIVYQFRHTLASKLCAKYKVILLPKLGIKQVAKHLRRQVNRKLYALSHYKFNELIKQIALRTGTTVIHCLESYTSKTCGNCGNLQTCDVDRTFRCKECHYIADRDENACKNILIRSLNNYILSCSSSGKRK

SEQ ID NO: 4924 - protein, 496 aa, Faustovirus
MIISCILCIFPIFNNRYYNYFLSFKFTRYIKYIMKFNIHRYYQSILNGDIESIFAKRKDEVNSPVCDYKFNNYAKLLSLTTHDEIKGIKRNESVEDSVIYETKTLTSPTVSVFGKIEVDATEFVAEDVQCARKIRIYPTEMEKSKINKLFSISNAFYNLAIEGIENKTININNKTDIRQKCRVNDDVCSTVHVDAKLAYFDTRSLAAMSAVSNYKAMLTNYQNGNIKHFKLSNKHSTQIVHFSDKNAKLKNGCLCIRDMKLRLRNRDLPWLVEHGINQQVSIKRYNHKYYVIVPFKRRSLDNNAKGICAIDPGNRTFATYYSPDEIGKLGVNLIEQVRKINAKIDHLRSVKDTVKLVSRTRYGLKQRIAKLSSKITRLVDYAGWKFAAYLTRRFRIVFIPRLANVVGKANSTVNRETRNLRHSEFINKLTHLGKVNGCKVVETKEYYTTKTCCRCGIRNDNVGSSKVFSCINVACKFTIDRDVNGAKNIWLRSLTN

SEQ ID NO: 4925 - protein, 468 aa, Faustovirus
MNINKNYGYLLGDLESIIDRRNFETNKENKTSSGEYIYDNRTRLLSYITPSETFDYQTNGLVGKYNIKAKDSITISALGKVEISNYELPSEYIQCARKLRIYPTESDKTKITKLFHISNAFYNAAIDGIVKKKIFSESSKKVIREECKVSNDVCETIHINAKDAYYDTRDLATLYAVANYKAMLTNKSNGNIKHFHLSNKHSMQVVHFSEKNARFKKGKLCIHDMKINLRRCDAEWLAEHRIKQQVIIKKSKSKYYLIVPFMRKNQDNGKKSICAIDPGNRTLATYYSPDEIGKLGDNILDLIKPIRNKIDHLKKLRNSDMVKSNTRYGMKQRIAKLNTKITNIIDYHQWKFANYLTKHFRLIFIPRLANCVSKQNGKFTRELRTKINRDTRSLCHSKFIDKLTHLGNVYGCKVVETKEYYTTMTCSNCGRVNRKVGGNKVFYCKGCKFTIDRDVNGAKNIWLRSLTN

SEQ ID NO: 4926 - protein, 463 aa, Faustovirus
MKFNIHKYYQSILNGDIESIFTKRKDEVNSPVCDYKFNNYAKLLSLTTHDEIKGIKRNETVEDSVIYETKTLTSPTVSVFGKIEVDATEFVAEDVQCARKIRIYPTETEKSKINKLFSISNAFYNLAIEGIENKTININNKTDIRQKCRVNDEVCSTVHVDAKMAYFDTRSLAAMLAVGNYKAMLTNQRNGNIKHFKLSNKHSTQIVHFSDKNAKLKNGCLCIRDMKLRLRNRDLPWLVENGINQQVSIKRYNRKYYFVVPFKRRSLDNKAKGICAIDPGNRTFATYYSPDEIGKLGVNLIERIRKINAKIDHLRSVKDTAKLVSRTRYGLKQRIAKLSSKITRLVDYAGWKFAAYLTRRFRIVFIPRLANIVGKANSTVNRETRNLRHSEFINKLTHLGKVNGCKVVETKEYYTTKTCCRCGTRNDNVGSSKVFSCVNVACKFTIDRDVNGAKNIWLRSLTN

SEQ ID NO: 4927 - protein, 463 aa, Faustovirus
MKFNIHKYYQSILNGDIESIFTKRKDEVNSPVCDYKFNNYAKLLSLTTHDEIKGIKRNETVEDSVIYETKTLTSPTVSVFGKIEVDATEFVAEDVQCARKIRIYPTETEKSKINKLFSISNAFYNLAIEGIENKTININNKTDIRQKCRVNDEVCSTVHVDAKMAYFDTRSLAAMLAVGNYKAMLTNQRNGNIKHFKLSNKHSTQIVHFSDKNAKLKNGCLCIRDMKLRLRNRDLPWLVENGINQQVSIKRYNRKYYFVVPFKRRSLDNKAKGICAIDPGNRTFATYYSPDEIGKLGVNLIERIRKINAKIDHLRSVKDTVKLVSRTRYGLKQRIAKLSSKITRLVDYAGWKFAAYLTRRFRIVFIPRLANVVGKANSTVNRETRNLRHSEFINKLTHLGKVNGCKVVETKEYYTTKTCCRCGTRNDNVGSSKVFSCVNVACKFTIDRDVNGAKNIWLRSLTN

SEQ ID NO: 4928 - protein, 482 aa, Faustovirus
MNIFLHYKYYYINIISMHLFNEEGNLKVNLQELRKICESEKFQRSETGFWNQNCSIIKDKLLATEFINHDKATDTIISRRIKFKPNYLQRKLLNDCFGAYRWIYNKAIDVIFEVKKYSDKFNCIIDIKLVKKAIYENVKINDDEIPDFIKILPSDSRKEALREAIKNYKTCLTHLNKKLCRRFLLKHKRKDATTFRIKTNAIKLTGNKLVIFKKRILDLIEAGNLNKDLRYATLNNGNLRRLKPYLNASGNPTAYPLINYSHGNYYIIVSGNRKVEQCNVKKEICAIDPGVVNFHTIYDGVVGYEGVKLYETRLEGINQRIDKITQHKQNFTGAKRKRMHLRELKLRAKVSNIVYQFRHTLASKLCNKYKVILLPKLGIKQVAKHLRRQVNRKLYALSHYKFNELIKQIATRTGTTVIHCLESYTSKTCGNCGNLQTCDVDRTFRCRACYYVADRDENACKNILIRSLNNYILSCSSSGKRK

SEQ ID NO: 4929 - protein, 693 aa, Tetraselmis virus 1
MSDSKANEPKKRQRGNVSRLQLDALLKDVEGEDTVPWWNHRLNFAASNGLISDLQLRRSLSYRNSCVKTSLRSIGVAKPLQDRFRLYSIACSKIQHRLGAVLNMAVVIHKDNEASLCRLASVCQDVQSLRDIMLDGPNPKPLEVVLAETRYPSLLRLGPSDEEISLMSSWDQAKTYIANRFVANVQVHVRSHLQRRIKKSLRSRINNTENDVAMKYVFSDGTAPEDSEDREHCERMKTRLYALKLLSRDGFTLPKREKVSPDMMLLHFDLCKEEIASFQPLPMATTLSRCHARICERVYGTLTKGMPNVPEFSSLVRERRKRVVPRRKWTKKAFRQVRRSQKAKKSGKRKQQIKKRRKQQKLKPDQQIDSLETDGYSVSLALKTPHKNPADNLSPEEKFEKHIARLKKVMTKPDAFVAGNDPGRKNLATQALLSVGSEVSSTQASRVQFTRSQWNSVIRSKQQRAWEEKRRNGPVKTALDALSSSGGKKSCNEDKWAAYLTASVENQRVLHQEFLENDERQRRRFLAYGRRQRAIDRVASRMVNTPDRKPLVIGYGNGSFPCHGRGGSDTSVPVKSLYRAVIAAFKKKRICGGVIKVWEYFTTAKCYRCHNRMEKMFKTVDGKKVEDRDFRCCATCTHEEHPKLRNRDWNAALNILVLTIAILKGEDRPEYLKPEKKKRRSAKRKADGSSIAH

SEQ ID NO: 4930 - protein, 587 aa, Tetraselmis virus 1
MPKRVRPPDKEEKTICMGLKKHLLEPSLLPVIETMVDNVSRRTHRASLLANHFFLKHIQHPGFDELAKAVTDQMFFYTALSLGKGKKYENLIEFFSANDSLYESIPALPLGGGRVMNSAARQMKTNVGNYLWMTFDARIKRFCSKSDKHAQAFVLARTRNWTPYREVVLNKNESQLLDLFSNILSTSENVTDSWILENPGPVLRLYHRIQRMCEEKQKEAKEKKQKGAKGFSMLPIFKMKSHFITIDATLLRELLVHGGLLNKNADGSAFEKLEDDHFRSVFKLRGSWLLGNEIKTDGFSLRVNIWRNASETPQRQRKRAFGQLEIENPSTENLLPGDYHDYFSNDPGQANQAFVHHTIDHKVVRKARLTYKQFCVESHHSANLKKQKRWLQEIQDENTELSLYPVRTSDVEIFKGYLSTKVPMYERLWKHHMHPRAARARWDYQIHSRSCIDRFWSGLAYNRPAGMPLHQRPLLKYGSANWGTGGAPNKRMLASAKKYFRVVLVPEFNTTACCADCGSRLKAVTQAFIGPLEEGKNRYPRTNRGLKHCSSNVCRSNPLKSRDGNAATNIGYAFPDRPEYLCPKITQ

SEQ ID NO: 4931 - protein, 640 aa, Emiliania huxleyi virus 99B1
MDDSHPCLIDMLNQQQSNNIMESTAEPLINGQEMEQLNTCDQHQTDNGYMGSSMETQVMDMFPSSMDESLPESNSITSDDSSMSSNRSTQDALPSPIVLPDLTTTAPVLNRFYDSRLKDVYNMFIYPTETDSVGSATISSSTYSTTMEQQLKLTNKMNSLPQTNRPSLQTTSFLSSQFSVLGCTEREVEAAVDAQVGEKRKKIPFQRQTELQGNLRTYKIKMFPTPEQKDELKRTFGMARYAYNWAIAQMKEGKKPNNIQLRNEFRKLPLPQWASEKKKQVATRITAGAIKQAVDAVLTNLKKKKKDPSHHFEMTFRSKFANSEVVNIEKAANGGSLAKMQAYTSEHLPYRAGRKNALLYFGNNLKQAGPILIEDNPNVIDMFVAEGKPKEDGKILYDRRRNTYYYIYLYEQPALRDPDPGFSDKDIVCTDPGEVVFQTFYSPSGSHGELLLDFRQVLLERCKKLDILHSRVTKKEKMRRQGLLQGRKNYLIIRRLKQAWARERARLSAFVERAHYFAANYILKNYDIIIQPQMAVSKMVSDLNSKVARSMLTMSHYMYNRRLEWASTRYAGRYIVHANEPGTSKTCTNCGYWHADLGTSRTFKCPSCGIAVSRDLAGARNNCLHAVGTVIRNRQLSEKR

SEQ ID NO: 4932 - protein, 625 aa, Phaeocystis globosa virus
MKKKKKGEFQEFRNNEKSAYKTFKIPIKSILYNYDTTQPVINNLVFEINDLMIHAYQFIRLYVLSCYTNKQTLPIIDDIFILYCIKTLGTRDNRGKKCKDTALLDTLEKFYLEEYQPLLNHEKTNLKNTTFLLPYLATQIHTSLSNNAQEHFIQHFLRFINTTTTAITEDKSILFKLKHQLMSLDNETNEMFNEWKITHLHNIFPQNIKKSIHYDVKVRPFEYLKGMLYMNEVLEKEEHKLFQPLPLRTNIIPKHIILDTASLVSLFCPETDKDGNKNKKGNLLSNIKDNQYDIWNSFLNLNHKIFRNQHYQFHHQIQTDGISCCLLFIRKDLKDKKWGSRVPSIPEQDFYNIEDLSKEQLDTLKDRNIVGCDPGKRSLVYMMDKNGNKLQYTAPQRKRESKAKTNQRILLEEKKRHKIIEKETELSLQNSKSVDYIKFKTYLVEKHKLNKETTEFYKKETWRKMNFRQYSYGKKSIDTFLNKIQETFGSNILIGYGNWSRSTQMKHFMPTMNKGLRKQIHKKYDTITINECNTSKKCCDCNKDLEYYKDKENKKVFRLLVCSNCVSCENKKIVFRTRDANSSINIMKLTSCWIDSQTRPTAFHSHISSFTCSTIKEEQEKVRPS

SEQ ID NO: 4933 - protein, 650 aa, Emiliania huxleyi virus 84
MPRNKKDDARVIKCPLDKILKPEIVSIIRDIVPVYNRIAISATLFLNLRIRQLVESRASSTEFAQFFQANKLVKYFMAVTSSTLGAGDLHAAFGTNFPSVIREDRPKAFSQVCMYICRNLEATATTNVWYHMKKRVCTVVKKTFGIPRDEWLHMSNEEKKNHKIHLKQVNVDVLSLEGDAFVSPEQYHDWISNLRSEMKVTHVTRQLLADTRGVDVDDPNVPGMVYYMKVKPYEFIYAIATLSSHLNSITGGGYALYPIRSSMVPKYLHLDELILADISPGISKGATNTAAGKKRTADGSELSNKDKLVARRMIVFKHVMTPKAFNKWENHLGWSVDTDGYGCSLHVKKKVNELPPSTHPSIHNGLIKIDAFKDKFSERYSINDLSIIGVDPGKREIVSAVDSMDYTSKYTFRKTHQDHLTGTVRHRKAMECTKPQSVFETEQDLATTSKKVVPVERFMDYATKLATSISSSSGFYEQGVYRKRKWKRHLRLQKAYSGIVNNLKMVSCHPNKPIVLAYGSWGMTTSGLPFKGLPPTIGIGMVRYLARFFPVVITPEYYTSTICPCCDSNVTRCTHVEQQRASPYFENGRLKDIRGLKHCPGCNTYFNRDNMGAWNIARNFTNMYQGMAPIRVRNAAQAAEQELTNRTEVD

SEQ ID NO: 4934 - protein, 768 aa, Dasosvirus sp.
MTKTDTLKKVKKKDEIIQNNDVPFRRKKELPDFRTMKTSLKSILKDEQVNKPIILDAVNRTHHVVIHVYQFIRLYILDKYHKNKPLPIINRDFIAMVFKALVKTSIAGNTPKGKNLQLLKEFNSFYEKTYRQLGYEEKIDGVNLSNIFSNMEVDILTNIKNNIQLHFFSYVNRFVNSSFRDENNRIIENTKKKDKVELRKKLKKELYRVKEDLKKNTLLSQKKYHKWIKKHRVNMFPKEYTDSYEFDIKHNPFNYMNCMIYMCLVLEENEAKSFQFFPLRTSICPKYIPIDTTILIDLFIKNNKREYLNNVSGCKEELWNRLFNVDNSIFKQKHYSFDHRILTDGLAISIQFRNNSKIEKNKQNNRNRVKASKNAKAVYKHMTQKQIDITKQKKEEKKKEEQMKKQLEIKKERERKKEENKKLPKEKQKKIIEQKKKEMERKKQEMPIDFPYLEELNPTEYEELKNSNWIVNDPGKRVLLYMKNKDGERLRYTNKRHVTKTKRLKYQTIIKNYKEKEGINDTEKKLTGCNSKSCNYDKFKEYILEKNEANKELLGKYEAEIFRKYKWFGYINRKRAETDLVREIKEKFGEDTIILYGDWSIGIQKRYMMSTPNISLKRKLKEHFTIYNIDEFRTSILHHKTGKRCENLHLYDKNKKGVREMHAILTYKMENNRIGCINRDENATNNMLTIAKEYIKKKERPERFRRGTELIDEEEITRSSKSKKQNSKQAPKKAPKKAPKKAPKKAPKKAPKQTPKPKQYQQKTRTSN

SEQ ID NO: 4935 - protein, 572 aa, Edafosvirus sp.
MLKVPLFPDKKQKLLLQLWFDDFTIIWNTTNSLLSKSLINKHPDDNNFNPSLYFDFDPADPNSFLSIKNNIIDQINKRKIRVKFKKNLLKLFQTKWTNIRLANKNKKYTKKNFSDMKIEKEQIINTYHEKFKDDMIHLNDENTEKYLNFISLRDNHLKKIKKEICLKNKIPDHVLAEAIDHNRSKYQSAISNFTEGNIDHFRIRPWKLNRRRRILIFEKDFFKGIIKEKTTYNDDENDSQTMKGIKDIIQELFKKYKPYKQKIVNKKDHNKLIMNIFDTIKEEYTNKEIEDTIRNKKLKKKSFAKTLKTFINREIKRIRKEQMNYYVRLCPKTLGNIRCSPMINEIESVDKTSTIIYDKIKKSYMLLIPVKKKIKEFLIKEEMLERTSKKCGADGGVTTFVTVYGEDQVSQLGKNPGNILKKYYRKIDYLNEKRCKMKGKKYDRKMIKAQDSIKNKIADMHWKIAREMCQEYDTIVLGKLSTINIVSKENDLPKIVKRILISLSHGNFRKILTLQGKKYGSEIRIVSEWKTTITCHRCKEENEVGKSRIYICEGCNLEIGRDINASINFYVK

SEQ ID NO: 4936 - protein, 726 aa, Edafosvirus sp.
MYVYTKTRFKNILRPDINYTELFSAIHRMHLITTYTYQFLKAFVIDCFDKNSDMPDITENFLRLIIKVICIKAPRSRALTEDNKKIFDQLQNFYDSKLNNTNMIPVDGLHLDNIVGYTITEMLTSIKNNIVANFSLKVKSYVTLTYKDEIKDEINKLKKKKVPQSHIKEKYKELTNEINLIKNDLLNNNEILLSNKKYHKWIKQERNKLFPELIQDSNDASKTHTYNVHVKPLEYLKHYVYLAKKMEEFNNEVSNTCKSFNFLPLRRSFVEKSIVIDTSSIIKLIKLDDTKLDDTKQSYLENICEKEDEIWSTVFKMKGKKYRRKGYTFNNYIVTNGYDVSIRFINNNNMKAEKNRKLKMTIGRRKAFQEKKKCKEMGTKYVTISEKLSVTEKKPKIRKTQKKEIEEKKYVDGIPYIEDASESEREELKKRKLLYIDPGKIRLLTMIDNEGKTMKYTCGQRLRETKRYKYREKLNKYAEKEGIKEKEKKLSEYNSKTSEYKKYIEYITEKNKIMNEVGDKYNKEEGIYKKYKWYGYINRQRSEARIVNKIKEEYGEDIIIIMGDWSENTQKKRIKRISVPGASLRRLLKENFRMYMINEYNTSKLNYKTEEETKNLIISKERRVPKYNKKKMEEVKVHNERLNEEDRELKRIHSVLTYKMENNRMGCINRDINSVKNMRKITKHILERGERPEKYKIDYHPKTKEKKTKVKPKSEKQKSVKGSHAK

SEQ ID NO: 4937 - protein, 514 aa, Edafosvirus sp.
MKKKYNKFIFDRQLADQFWLPIDDNFYATLNIPTDSWFDLSKTNTNSPTVIQFNKNKQKDIFVTRTQKIKVFPTPYQKNILLDWITAYRYMYNATITYTRKHEINDDKERVKLYNFNKLRKIVNDIVKNNKQMYDWIKIIKIPQHTLDNAINDVCKAFKSALTNKQKGNIKDFKLRYKKESTVKQTILLEASCFQNNKFKVDALFYIRHLYGEPYKAYRENKNTFSASVMGDYIQTSESIKDVNTTSRLTYNKNTNEFMLFVPYEKSTENIENREKMISLDSGKRTFQTGYGMNEVLDIGHTCIKKLDEMVSEIKTIKETIKKISDDPTYKLKIKKTKKKKFKKTKKKKAEEKSPKKKRKVPIIKKYKKQLYQKQRKLTNRVDDLHFKTCNYLCNNYDIIVIGRMNVQSIVSKKNKTISQETKESLLALRQYEFRTRLESKCEERGVKYYDTDEADTTRTCGCCGGINNKVGGAEIYECRKCKMKIGRDYNGARNILLKIYETIKKDHKIEIIQ

SEQ ID NO: 4938 - protein, 505 aa, Edafosvirus sp.
MVHLKFNKKKKKKKPFNPYHHPEYKKLSTSHALFSPSLWNPHDLPLSSVANDTDSWFDFVEYTDNFSVPIQDFSLFKNNSHDLYKHFFRNKFKNIHTRNKNYKTIIIPLSLTFFQQKIMLHWMYCCILMYNATVECIRKIKFNTGEYMYAFRTLRDKHLKHIKKYITSISRVEVDGIIYYIHAHTLNMTIKEVCNAYKGCMETYKYYILDKNGKYIKKIKPFRIKYRNFNNPLKYIAFEARTIAPDKMSFFASVFGPIIERRDGLDFRDIKREFLIQYNTKTNEFTMLSPQIIPPQKKENNEPMKYISLDAGLNVFLTGITNDKVVELGSNLIKVIMELLKKIDKIEKDNKPNKKRRKRRLEKKIKNLIEDMHWKIINYLVKNYKIIFLGELKIKNIISNTKELPEILKRITTTMSFYKFRERLKYKCKVNNVELHMVNEMYTSKTCGKCCKINEVEGRKYECKHIEGIKIKKYVVGRDINGAYCILLKGIYDTQISCIMGEKIK

SEQ ID NO: 4939 - protein, 573 aa, Edafosvirus sp.
MYYSMNKIRKKKKKKFYNNDDFEKEKLSLHDQVLLHHDKLLLPSYFVRLKSIKTDSCFDLLSYTQTDNNLICNDVQFNITPPEFKPLIRTIKIDMLLNQSQQLIFHTWFDATMLMYNKTIEYIKKNFNIESLHEIKRINKLCYALNDKLTHLYKDVSNLIKNKKKLLTKLKNKYNKKKKTSIDLITINILMKDIIDHKNKITCLNILIHNLNSDYNKYNLRRNKLDKHIDHIFDHTHTRTYVLKSTTEDILLNSQTKLFNYDTKIKTHMLNAAVKQASAAFKSAKENFLNGHNKKFRVRYWRPNRINKIIEIGAEYILEIEKDSEEYNLCPHIFGPIKYRYDGEEYKLEKKTVKIHYEGSTGRFRLLVPEDLEAKKRCKNGKYIGIDAGIRTPFTGISNNELIKIGKKLVEMIRMRLIMMDNIMNNPDIPERSKYNKIEKYTRIIKDRVVEMHWKVINYLTENYDIIIIGKLEMSKILRSKKIDKMTKRIGSALNHYKFLERLIYKAKTKGVEVEVVNESFTTKTCSNCGHYKEELEGEEVYNCDEYGCLKKIDRDVNGSRNIMIKRIKKEEI

SEQ ID NO: 4940 - protein, 876 aa, Gaeavirus sp.
MPKRRKFKKRKDIDVAKLTGFDFIKTNKDNIINVIINKAHLITINEFVARVNKIVINAYQYIKLYLIHLFDNNKTFPKLDEAFIGDVFRILSSKQLSVKTSLKLKDLISFYDDYFAPLIDKNDIQSYKYMRYTLQYEAIDMKKNIYVNIQEHFIEHLNYYIYIMLDVKTKRNKITSDNKDKEIRKVLHTELTHDINNVLTDLTNFEEPISKPEYHKFIKNERKNIYGNKTQFTGDTVFYEIKCDDKQHDYLRPLFYIHRKLEEKYNEIHEQNKFIEETNLIIKEYNDIAFSQIMKDNNELIEIIEYKSKFIDTFKECAKALNNSWTNTRKVQNTNFMNLRNKNSKLFDVIKINKATIKTNLEIIKFNKQFGETIDDRLVDMIVKCQKQNYNMMQTIRHDRNIVKMTNLTISQDNTEINYHTKNNKRTMKKYEKLNFENKLIIHNLKTREALKTFPKIKQIKLFNVVPLRTSIISKHITIDTQGLIWMFYSGDHVVEYIEDCKDDKDETLKLWGEIFNLDKKVFKNKKQNKKIVYQFHHMIRTDGVSISVLFERLNPDGSVHKQEKSKIYGIVAHTPYIEKTLITTDLKTRKIVCIDPNMQDIIYCGSKNKNNKLETFRYTQNQRRLEIGTKKYSKIMDEINKKPTIVSKTLTNETIKSTVKEIETELSKFNSRTTNMTEFKKYIKAKNIANSKLFSHYSQTLFRKFKLNRFINTQKSEAKLVSKFGNKFGKPNVKSIIKKVDTSPIIVMGDYDNGTNNLKGCEPVICKKIRRILKNAGYEVYMINEFRTSVICNRCHEKLDKFLKRKSSKPNSRMEEILVHGLLRHTDEKPEGEQEAPICKIIHNRDKNAVQNMIYIVKEIMRTGIRPAPFRRDNT

SEQ ID NO: 4941 - protein, 798 aa, Gaeavirus sp.
MKRPPDIYVTSKCSLTSIIRNKSNIDVLLDAANRTNQLVIHAYQFLRLWILDKYHHNKNIDLIDHDLISMAFKALSIDSNGPKPKDDNLRLYNEFKTFFDDVYSKLECKLKNNSKNLSKILQYSATEMITSIENNIKNNFVKYVKKFVNSSYSNQIIEITVKLEGKTKTKKKKELFTELSLVKDDLLCNTLKSDKKYHQWILTNRPKLIPPRASKIIDDDIQINPQGYIKSMIFMCLEIENITIVNPPAKKINTVTKVNSTTKNNFIAFNETKAKCKSKTFINVSSMIKDNGYLRRINRRFKRTMLKQRQMQAKFINPSNNIKKKVKKSNTNDNNHKVKSFQFFPLRTSSIVKYIKLDTSAIIDLLVKGTKEECLKNIKGNKHALWNTFFNLDNPIFTQNTYKFDHKISTDCKTVSIQLIHKDHIKSKEIKQDKIVAGRATVQLKKKAMTPEQLTLYKANQKIKNIENKMKLKTDAVDKAQTAKDEYNKLQPDEKLKVRKELQKKSHEEFPYLTELTDIQLTDLKKNDWVVCDPGRRTLFYMKSKDGTKTFRYTNKTHVQRTKRLKYQTLIKNHKNKLGITKIEEELSKFNSKTCKLVEFKNYIQNKNKANVELFKIYKSDYVNKTSGDKFRKYKWYSYINQKRTVAKLNRKIKQKFGKDNIIVMGDWSASSNSSIKYISTPNIGLKRSIAKSRTIYSIDEFRTSCLNYLPAAEKSKKLYLPDKNQVLRKLYPVLTYKTESKTLGCINRDENAVRNMINITSRHIEKQALNKRYCRSYDLKKDSNQSMVKCCHVVRCN

SEQ ID NO: 4942 - protein, 686 aa, Harvfovirus sp.
MPKNNDNEHITMKYPYDSIKISPASDSILNYAVDRVDSIVKQLDFFLRSYLLYQYEHDEELITINKYTIETAIKCLTQRPIAGPPTKNVNKVALEHKFIEFYNKHFAEYILSFSQYHTVENVDQLEAFKIDKTNLTQILSYTVTNIMTNINSNIKFHFFDYLRRFVNQSFKASNEIILSQYKGKAKIQQQKILTAEIFLVKNDLINYTITSDPKYHNWLNYYRPKILPTQYNISLEHDIDSTPQKYLKYMITMNKLLEEETLKGFQFFPLRTSIVPSFIPLDSTSLVELFIPADKKKYLFNIIKYKDEIWSKVFQLNHKVFKLKGYQFDYNIMTDGYTVCLKFIKNEYVDDKRKAQANKNQAGKDTKQRNKDLSPIQIDQLKKKKEELQQQIKDEKKLARIEKKKEFDNLPKHEQTKIIAQIKQKLEFLYFDKLSKKQTQHLGTAKKIYADPGKRSILYMMDDEGNYLNYTNAMRMKGTKRLKYQKLRENFKKRENVNMIENQLSSFNSKTCNYLWFMCYIEMKMEIDRHLKKFYSNELFRKLKWFSYINTKREDARLLNLIEKKYGKDITIIIGDWSEFGKVKYMSTPGIGLRRKLAKRFKVYMIDEFRTSCLHHKTEQRCENLHIELNSKVRKIHSVLTYQMQNKRVGCINRDRNAVQNMRKIVHHYLATGERLERYSRSYKIN

SEQ ID NO: 4943 - protein, 685 aa, Harvfovirus sp.
MAKNNDDEYITMKYPYDLIKLSPGSDSILNSAVDRVDSIVKQLDFFLRSYLLYQYERNEQLITINKYTIEAAIKCLTQKAKAGPPTKNVNKVGLEHKFREFYNKHFAEYILSFPQYHTIENVHELEAFKIDKTNLTQILSYTVTNIMTNINSNVKLHFFDYIRRFVNQSFKASHDIILSQYKGKAKIQQRKILTAQIFPVKNDLINNTMTSDPKYHNWLNYYRAKILPAQYNISLEHDIDSNPQKYLRYMIIMNKLLEEETLKGFQFFPLRTSIVPNFIPLDSTALVELFIPDKKKYLSNIINYKDEIWSKVFKMDHKVFNLKGYQFDYNIMTDGYTVCLRFIKNEYVEGKRKAQANKNQAAKDTKQKNKDLSPSEIDESKKKKEEQSQQIKDKRKLARIQKKKEFDNLPKEEKAKILGQMKQKLEFLYFDKLSKKQTQRLGTAKKIYADPGKRSILYMMDDEGNYLNYTNAMRMKGTKRLKYQKLRENFKKRENVNTIENQLSSFNSKTCSYQKFMCYIEMKMEIDRQLKKFYSNELFRKLKWFGYINTKREDARLLNLIEKKYGKDITIIIGDWKEFGKVKYMSTPGIGLRRKLAKRFKVYLIDEFRTSCLNYKTEQRCENLYIELNSKVRKIHSVLTYQMQNKRLGCINRDRNAVQNMRKIVHHYLATGKRLERYSRSYKIN

SEQ ID NO: 4944 - protein, 906 aa, Hyperionvirus sp.
MKDDNLSETPNENDNNKKNNIKEIDDEFSYTYEIEAATSIKCSLLSVLNSNSKTRKKKMAIYIQGLIEDYNKISLDGIYLFNILIRTLIKKRLYSKINSVTIRRCFGILKEGDKYITLKDPPNPSEIDMIYEIIESYFKNNNYLRPEFNHDEEGFMKPLEACADGYLNNLILHIRTNFFRFQRKYLKSKIESEFENHKLSRSEINILTLVIQKKLVNLEYSPRTDKNIKKLQCLLGKIPNLNVFTDNEKKLLKEFIEDLELLETEEKMIKKISSDNIIRFLSYFSLMLEYLKSIEKERFSLIPIFQPKMRFFRFDPMTLCTLYNKWESINGYNPKLPAAYFKDNFDNYFDVMFNISDRFHKILNKFPTIKSIQTDGIAVVLTFEKRKEIKYLTDKDKREENRIKRETEQKKIKKEFLEKMKGLRTKISSLKKDIGEGKKIIGKYIYLEFDCICIKNQIIEMSEQIKNSDNDTVREKILRDLKKMSDKYQNIQKSLDDCDKDMFLKFKLELKRKQNNLDTLEKELESLRKKPEIIDLEKKLNPKRQDIGMYESTEVRCSPEFLKEYRLVGADPGNNPMVDMACEDGIHVTISKNEYFDLAQVFNNNNKINKLREEANMNDITTQLSKTTYRTASTEEFMEYVKVIKKNWNEIWDHYSDYKLSKIKLSSYRSSQKAISGMARRIIERLNDEKNINKYMKSKEMKLDKSILEKPIIIFFGKGNGSLTISNTKNTSSKGPIKRLIEALSKYVVVILTPEYNTSKMCHLCGEKLIDIETYNFPKRKSLERNMLKRMKDNKENKTAKEIEKSEIDDNIKKIKEIERLRGIIHKLKKIRKEKKNRVKIEEIEREIEGMKCGRRNCYQTSYKLRRCAKHHEENLCKLFERNLNAAINIRKKGIKIITTGICDEA

SEQ ID NO: 4945 - protein, 738 aa, Hyperionvirus sp.
MPKIDPPDKYTTIKVRLNQISQNSDCLKNIAEAVKNMNILIRHVLFFINAYLLYLYKNNKEFPIIDKPYIRLIFRLFCIKPKRGAAMTKENQILFKAMQKFYEDHFILTNPHHLIDGQSLSYMIGYATTTILTNIENNISMHFINRVRFFVNQNFVDFIPQEIDKMTGATKSELVEKRKELHKKIEQVKKDLIDNNETLVSDPQFHQWIKEIRSKIFPVNYSESYAYDVTVDPQKYLKCMMNMNSELERKELKTFQCLPLRRSPIEKSVTIDTKSVIDLLCENGTKKFYHDNMMENQQSLWDLFFRTKSKLFKRKKYVFDYTITTNGYVASIRFLNKKYLEQNNNTKTKKRVGRTNTAKARRERRISMEDQKDACITVNSLITDYLETDDTDNKTYMNLDISDTTKIVNYLLSEKINNKKVSSQKPTEIKVKQIKGEKKIKEVDPRYEFKYIQDLTGTELEYVKKAKKVYIDPGKIRIITAIDDDDEVYKYTCGQRLMETKRLEYQNKREKFKDYHYITENEERLNKHNAKTCNFEKFMEYVKDRNELDYIQDGEDLDLGLYEVYNNNRIFKKLEWYNVINTKRSEAKMINDLMSKYGKDAVIIIGDWSSNMPIKRISTPGIGLRRLLARHFKVYLMDEYRTSKLNHKTEEENSNLELPDKKRKIRKIHSVLTYKMSNGRMGCINRDINAVKNIRKIVKSILETGERPEKFKRKREEPISVKSFQVVVCEGTNNQIAQ

SEQ ID NO: 4946 - protein, 689 aa, Hyperionvirus sp.
MVLKKSEGQYITQKYLLSRITKTRDHDDIFERTVRTIDTIIKYVCFFLRSYLLYQFKNDEELIHIDRGVLDIVIQCITKKATGGPQSTKQAILRQTLKDFYNNHFAELTLNFAQYHSIEDISDYEFFKIDKKNLSQILNYSQTEIITNIENNIKLHFLDHLRRFVNQTFKEQNNQILDKLKTKKQKMDCRKRLTAELTKVKNDLINYTLLSEQRYHPWINTYRNIILPNNIDKTLEDDINATPQKYLKYMIRICRLLEYEGKKTFQFFPIRTSLIPKNITLDTASLVDIFFQENKKEYFDNISHYKEELWGEIFNLQDPIFHRKNAVFDYSIMTDGYSVSIRFLKKQYIEANKKKKDNKQNAGKKSKELYKDLSEEEIQKIKNDKSIKDKQKKADQSKAARERKKEFKHMSKEQQCKILENAMEFIYIHQLAKKKRRELRTAKKVYADPGKRSLLYMIDDEDNTLNYTNATRVRGTKRLIFQERIEKLKIKENINEIENQLCKYNSKTTNFEWFKCYIEKKIEIDEALRNFYHQEVFRKLKWYAYINKKREEANMLNMIEKKYGKDIIIIIGDWNDSGRINYMSTPGVGLRRKLAERFEVYLIDEFRTSCLHNETEERCSNLYLEHNNKVRKLHSVLTYRMNNKRLGCINRDKNAVLNMRKIVHHFLETGERLERYRRGINIKEKPTPK

SEQ ID NO: 4947 - protein, 681 aa, Hyperionvirus sp.
MVLKKSEGQYITQKYLLFRITKILHHNIFQKTVRTIDTIVKYVCFFLRAYLLYQFKNDEELIHIDRGVLDIVIHCITKKSIAGPPSKKQAILRQTLMDFYNNHFAELTLNFAQYHSIEDISDYEFFKIDKKNLSQILNYSQTEIITNIENNIKLHFLDHLRHFVNQTFKEQNNQILDKLKTKRQKTDCRKRLTAELTKVKNDLINCTLLSEQKYHLWINTYRNILLPNQTDKTLEDDINATPQKYLKSMIKICRLLEYEGKKTFQFFPIRTSLIPKNITLDTASLVDIFFQENKNEYLDNISLYKEEIWGKIFNMQDPIFHRKNAVFDYSIMTDGYSVSIRFLKKQYIEANKKKKDNKQNAGKKSKELYKDLSEEEIQKIKNEKSIKDKQKKAALSKAAREKKKEFKHMSKEQQCKILENAMEFIYIHQLAKKKRRELRTAKKVYADTGKRSLLYMIDDEGNTLNYTNATRVRGTKRLIFQERIEKLKNKEKINEIENQLCKYNSKTTNFEWFKCYIEKKIEIDEELRNFYHQEVFRKLKWYAYINKKREEANMLNMIEKKYGKDIIIIIGDWNDSGGINYMSTPGVGLRRKLAERFKVYLIDEFRTSCLHNKTEERCSNLYLEHNNKVRKLHSVLTYRMNNKRLGCINRDKNAVLNMRKIVHHFLETGERLERYRRGINI

SEQ ID NO: 4948 - protein, 777 aa, Hyperionvirus sp.
MDEVDKIKEDNPEKIKYETKLDGITSVVCKLNSVLNGDIYLKEIIYQKVIKSNKIILEGIHLFTIYVLYIISQDEHMPITETTIRRCMRYCLTNPNSSRSTGDIDEDDIIQHVKKIYFDFDIIGREDDFFDDSQGLMKGIEATADTYHTNLIMHIRTNFKRFQKRYLRHRLTKFLENYKDVENDAITFLLPALQQMINGNHKYSYRTEERRVRFNTLVIKYDLDSFGLIETLLLKEFIPFSINFADELPKVTDKEIYNYLSYFSYILKEFKEHDLKRFKLVPHFVPKIRYITFDARPLCAIYNSWKQTDINVKIFEKDYEKYFNEMFHIKKKYKKLLKKYPSVRSISTNGYTVSLRFQKITKKISVPKQPQPQKKEIECSPIIPKIKDLKTEYIKRMEINKEKHHHNDKTYRIPMSFDVKEYKADQSFLDNFDLGGGDPGNDFMLDISMKNGIHLNIHKNYYNNIAHIIRNKMLMDREIFKSEMNHIYSELALENIKTTDIRDYMSYVKVIRKNWNKIWEFSTKPQIFSLKFDSYIYKSKAISRIAKEIVGGLKDDKNIKDRHANYFDPIMFEENKEKVIMLSIGTGNGSGTISNTKGSGPKGPVKRLIKELAKYCVVVEVPEYNTSQLCSECDEFTTDVYGYKIPSENGRKKKDQNKMEKEVEKKEIGITIKATHRGRRTKEMLRDALGENGIKLDKKKIDRLKKDIKEYDKMAKKYNYYGKLYRLRRCAAKHYHNDRCILWERNKNASMNMIKMLENLLLRGTMGHFMKKRKKSG

SEQ ID NO: 4949 - protein, 644 aa, Satyrvirus sp.
MSNKRNKKISNYDLFIDNRRKCPVKDPIYVSNSEYNLTDWMPPINKETINLYTDSWFDIKYYRNPTPSITNFNPYSLLCQDIDLLLEQNKLPYSTPQKIVKYPIIPEESRAQQKKSIKWKKLKKEPVFLSTRKILLNPSMELKKLYHSWFDAFTKMYNVVINHVRKIIFVNGKLDLKLAYETIKFKDLRDKLLNQKNQIKSETSPQIYTHILDEAISLAVSNYQSCLTNLRNKNIRKFRVRELQSTRRRKIFKIESAFFSNKKFCELVFPMLEKQLLESIKHTCILQYDSFTGKYLLLVPYGEKEKSKETEKNDLDCGIDLGIRTFATVYSKYDTMSIANNISEFPNIKKNMRKIDKIQELLKYNREKNKKNKIEKNKKKNKKKEIEKNEKKEIEKNKKKEIKKIKKKEINKNNTNEIKNDKEIKNDKNKENDKGDIDIDMLVKEKKTSSLKKALRKYQRRIIDIIRDMHFKAAYALVQRYGKIFVGKMSTSTMVRGNSVLSKLNKRMVSILSPYLFTQRLCYMCHKYGTEFAKVNEYLTTKTCSNCGFVNEVGIRKIYICGGCGKVIERDENAAKNHLKIGYKNERNKGKSISKTIIKKNPQKKTNTKTIKKKNDLNKKEIEEHVYKGKVQKTKINGKEIYII

SEQ ID NO: 4950 - protein, 665 aa, Satyrvirus sp.
MHTNKRKKKTLSYDLFIDNRRKCPIKDPIYVPNSEYNLTDWLPPPINKKMIDLPTDSWFDIKYYRNPYPSVTNFNPYSLLNQDIDTLLEENKLPYNTPQKLVQYPIIPKESRDQQEKRIKLKKLNKEPVFLSTRKILLNPSMELKKLYHEWFDAFTKMYNVVVNYVRKIIFVNGKLDLALAYKTTNFNDLRKKLRSQRDKIKSQTSTPIYTHLLDEAISLVSANYKSCLTNLTRKNIRKFRVRELPSSRRRKILKIESAFFSNKTFCELVFPMLDSKLLESIKHTCILQYDSFTGKYLFLIPYSEKEKSKEIERNDLDCGIDLGIRTFATVYSKDDTMSIVNNISEFPNIKKNMKKIDKIQELLKYNREKNKKKEIEKNKKKEIEKNKKKEIEKNKKKEIKKNKKKEINKNNTNEIKNDKNKKIEKNKKIEKNKKKEIKNDKNKEIEKDKNKEIKNDDIITEIIKEKKTSSLKKALRKYQRRIIDIIKDMHFKVAYALVQRYGKIFVGKMSTSTMVRGNSVLSKLNKRMISILSPYSFTQRLCYMCHKYGTEFAKVREYLTTKTCSHCGFVNEVGARKIYICGGCGRTMGRDENAAKNHLKLGYKNERNKEKVEQKIISKTVTKKNPQKKTTSKKVIRNKKEIEEHVYKGKIQKTKINGKEIYII

SEQ ID NO: 4951 - protein, 670 aa, Sylvanvirus sp.
MTSIQTKKRKNEDGETTTRPDVALRYARRKEFSNTCIYLKWSKMCKDPLVRKHMPDLLINVNKLTLFLYPFLNYYASRLGQLDPAAEVRWNADFIRMACIGLLQKSNWKDDQEFQPFFQKILEEYIFRIKKTEKGIHLLDAMTLEFKGLSFFINELAAFVWTMCENHLRINLFSRVVKWIQFRFNIPNKKYATKILLEAFDLNSTERKADYTDIPVDHKIVTEYIGMLPSEENIGKNFDLFVKLSIKLLVDMEALALEKDSITGGFKKGVRVFSILPMKEGFSLSHVAFSNSSLQQLLTWIQRKERNPLTQTYPTFNLLESTDTLVTKAWFDTHKELIWNTLFNIKQVEKGKKKFAYRISTNGYSCSITMEVSRTVPVLRKSVNAKANSKRKTDAEYQLPNNFDFKKINRIVGIDPGYTTLFSASTSNERSKKDCISLSTKQYRHESKMHEQRYYYQNFLKHNPELTTIILATPSFKTADPEEILKGIDFLVEHADMLFQAFRKSALPKFKFKVKTFSAKTLTQHCKKIVGSTPKTCVVGVGDWSQKANGFLKGGVGASPNKKFLKELKQRQGVTVVLIDEYNTSQFCFTCKSKLEPVYLKCKLKRQEEKEEPEAITRKVHHVLHCSNNECGMYWNRDINSSHHHQHLMFNLATKQGRPSYLMRIQTNKG

SEQ ID NO: 4952 - protein, 441 aa, Sylvanvirus sp.
SEENIGKNFDLFVKLSIKLLVDMEALALEKDSITGGFKKGVRVFSILPMKEGFSLSHVAFSNSSLQQLLTWIQRKERNPFTQAYPTFNLLESRDTLVTKAWFDTHKELIWNTLFNIKQVEKEKKKFAYRISTNGYSCSITMEVSRTVPVFGKIIKSKANSKHKTDAEYQLPNNFDFKKINRIVGIDPGYTTLFSASTSNDRSKKDCISLSTKQYRHESKMHEQRYYYQNFLKRNPELRAIILETPSFKTADPEEILKGIDFLIEHADMLFQAFRNSALPKFKFKVKTFSAKTLTQHCKKIVGPTPKTCVVGVGDWSQKGNGFLKGGVGASPNKKFLKELKQRQGVTVVLIDEYNTSQFCFTCKSKLEPVYLKCKLKRQEEKEEPEAITRKVHHVLHCSNNECGMYWNRDINSSHHHQHLMFNLATKQERPDYLMRIQTNKG

SEQ ID NO: 4953 - protein, 205 aa, Sylvanvirus sp.
LKTIILATPSFKTADPEEILKGIDFLVEHADMLFQSFRKSALPKFKFKVKTFSSKTLTQHCKKIVGPTPKTCVVGVGDWSQKGNGFLKGGVGASPNKKFLKELKQRQGVTVVLIDEYNTSQFCFKCKSKLEPVYLKCKSKRNEEKEEPEAITRKVHHVLHCSNNECGMYWNRDINSSHHHQHLMFNLATKQGRPSYLMRIQTNKG

SEQ ID NO: 4954 - protein, 479 aa, Sylvanvirus sp.
MFKVLISKGGDYYPPYNNENENKNPSFHNYKHLMTREIMIGSAAATLAALAASRFRVCQPHQYMVRTGVFIKEMMVSKKGFHLPFQKCSFVNMSPASFSFELHHMSKDKVPFNLPISLTVSPFDYRVKPELFLNYARTMSALTDSSIENTIKSIANGEMRVLSASRTIEEMFSGREEFKRYITDIVQSDFNNFGLEIKNANIEEMKDLPNNFDFKKINRIVGIDPGYTTLFSASTSNDRLKKDCISLSTKQYRHESKMHEQRYYYQNFLKHNPELTTIILATPSFKTADPEEILKGIDFLVEHADMLFQAFRKSALPKFKFKVKTFSAKTLTQHCKKVVGPTPKTCVVGVGDWSQKRNGFLKGGVGASPNKKFLKELKQRQGVTVVLIDEYNTSQFCFKCKSKLEPVYLKCKLKRQEEKQEPEAITRKVHHVLHCSNNECGMYWNRDINSSHHHQHLMFNLATKKGRPSYLMRIQTNKG

SEQ ID NO: 4955 - protein, 508 aa, Terrestrivirus sp.
MFNINVELEKVGSKQIQFFPLRKSLYPKYIPLDTRALIDIYEENKNSYLDKIQEQKDNIWNKFINLNNKIFKHKNYVFNYFMMTDGFAVSLQFMHKNYIEKETEKKMKMKIARKKKRDETKSKNSILNDMSLDLNENISDNKIKQNKNMSSILNELDDEIKLEENKEVNKNKKEKEPTHIEFPYIDDLEGVELELLKEAYKIYIDPGKTNLFMMMDDKGIYFRYTNKQRVFETKRLQYQKRIENEKIKRNITLMETKLSSYNSNSCSIEKFQEYIEKKNITNVKLIKRYEDPLYRKLKWYSYLNSKRSDDNLLNTIEKKYGKDAVIIIGDWEIPKQMQNYISTPNIRLKRVLARKFKVYNFDEYKTSCINYKTETICENLKLKDPLKEGKIRKIHHILKYQTESGRLGCINRDKNAVNNYKKIIDHWMKTKERLKNYRREGREKPITPMKITSKKKGKEVSNKGESEQTHILTIEKIEKAKKKPSTKIVVKSKNKIIKVIPLKKFDFK

SEQ ID NO: 4956 - protein, 308 aa, White spot syndrome virus
YYQESWMTDRRKANETYKKNNKEYKEALEEITRYDNGEEIINDGNGDTSTPTKKFEAYLKVVNEHYRLLWNEKGKKKYRKNAMKVYSRKQKCISNFIDELIPKRDKIEDYHIAFGDAKFACTGRGEQYASPARIFAKKIKERVGGDKRFTFVDEKYTSKVCHRCNQPLNMLEKDCFSPNKKRKPPTIVTTTTTTTTEEDEENGKWKKATPLRENRDTRRCSSEKTQFGYSSNRKVSTGDISMETPVPSSTSSSFCTPTSITCVLGGKFVDRDFNASTNIVHKFLGFWDKKLMEKKDKMPLKYHFIRVA

SEQ ID NO: 4957 - protein, 778 aa, White spot syndrome virus
MSASLLTETSLEEEQRREVNNNTSKENDTMEKKTETAATTEKDPEPSVSKRSRNKEPKTTSTVYTSVKCYLSSIIKSESSRSNVTSTKERFEERCKSVSKMMVKGSLFLRLVVDECLRRYNHLEDEIDKWPDMTKDNFYVQLLRKGLDKKKLKEGSTHPVVEDVWNSPIVQETFLSQQGEGNNPIKRHLMDFNTITYAAKQLKTCFETNLRTHFRTRQQRAISGWLAENGFDKKYTKLVQHWIIGCTYKSDWVDSGDLERVKEGTKNFVTLHRKHLCVISDKKNGTISYSPEEKYPIPSILNYYKFLQTEYPQNKKIQKMIVVPKHKLKIHYCTFDQTTIQGICKDLGVWKDMEERHKQSEDILYKQGWYLLFDVKKIKKLRPNWNFHSIQTDGEGVSVLFSREVEEVETVSKKSKKNKKPRGDEDRRNYPPTNAKYVVGVDPGRTNVVSCSVFDTRQKRVVRKHRMTAKQYYQESWMTDRRKANETYKKNNKEYKEALEEITRYDNGEEIINDGNGDTSTPTKKFEAFLKVVNEHYRLLWNEKGKKKYRKNAMKVYSRKQKCISNFIDELIPKRDKIEDYHIAFGDAKFACTGRGEQYASPARIFAKKIKERVGGDKRFTFVDEKYTSKVCHRCNQPLNMLEKDCFSPNKKRKPPTIVTTTTTTTTEDEENGKWKKATPLRENRDTRRCSSEKTQFGYSSNRKVSTGDISMETPVPSSTSSSFCTPTSITCVLGGKFVDRDFNASTNIVHKFLGFWDKKLMEKKDKMPLKYHFIRVA

SEQ ID NO: 4958 - protein, 778 aa, White spot syndrome virus
MSASLLTETSLEEEQRREVNNNTSKENDTMEKKTETAATTEKDPEPSVSKRSRNKEPKTTSTVYTSVKCYLSSIIKSESSRSNVTSTKERFEERCKSVSKMMVKGSLFLRLVVDECLRRYNHLEDEIDKWPDMTKDNFYVQLLRKGLDKKKLKEGSTHPVVEDVWNSPIVQETFLSQQGEGNNPIKRHLMDFNTITYAAKQLKTCFETNLRTHFRTRQQRAISGWLAENGFDKKYTKLVQHWIIGCTYKSDWVDSGDLERVKEGTKNFVTLHRKHLCVISDKKNGTISYSPEEKYPIPSILNYYKFLQTEYPQNKKIQKMIVVPKHKLKIHYCTFDQTTIQGICKDLGVWKDMEERHKQSEDILYKQGWYLLFDVKKIKKLRPNWNFHSIQTDGEGVSVLFSREVEEVETVSKKSKKNKKPRDEDRRNYPPTNAKYVVGVDPGRTNVVSCSVFDTRQKRVVRKHRMTAKQYYQESWMTDRRKANETYKKNNKEYKEALEEITRYDNGEEIINDGNGDTSTPTKKFEAYLKVVNEHYRLLWNEKGKKKYRKNAMKVYSRKQKCISNFIDELIPKRDKIEDYHIAFGDAKFACTGRGEQYASPARIFAKKIKERVGGDKRFTFVDEKYTSKVCHRCNQPLNMLEKDCFSPNKKRKPPTIVTTTTTTTTEEDEENGKWKKATPLRENRDTRRCSSEKTQFGYSSNRKVSTGDISMETPVPSSTSSSFCTPTSITCVLGGKFVDRDFNASTNIVHKFLGFWDKKLMEKKDKMPLKYHFIRVA

SEQ ID NO: 4959 - protein, 526 aa, Megavirus baoshan
MFWNDQCAKLSKSLWIPSNTINLKSNKKKYFKCDNPNISFNYFTDGIKINKKIKFNDIKVTDNHDKKEKLRNKLIKTENTRYNKEQNNQKCKLNKQELNDKHKKFLDKIEIKVNQLDGFIRSRRIQILPNKKQQNIIQKWIYDTTSIYNKLVCNFNQIYDKCQKIVDNMNVENKFYHLGKIIKQNTEFPINFHKLRALKCSDFIQDYDRIPYCVIADIIKEFVSNIKSCITKISKGLITEFKFKPRKYNRICSSIPLESHYTTVRGFYPSIFGEIKTNEKIFSWLDIKHDYKLIYDKYSNKYYIHVPKYVYRNDLTIKKPIAIMDPGARTFQTIYGLDHIVTIGDDLGSTLKKRLLKIDNLKSKLSKPGKYKHNKKLDRKTKVKKWKYKRAIDRHHKKMDHIQQELHYKTANYLCSHYNRVVVTNFSSKKVGLKKNDLDAMTKRILGKLSHYRFRQRLLTKCEEYGSQYYEVDESFTSKTCCKCGNIHKTLGSSKIYDCIKCKNKIDRDVNASICILIKNKDILLK

SEQ ID NO: 4960 - protein, 424 aa, Moumouvirus australiensis
MYKKNSKILRTKAKKGCIHVVSKNKSSSKTTKNKSQCGSKLYNKYFCSKHKHIKPKLDLPLGFVFWRNKIIKKNGDLSEDEKWLSEIPYDTRQLVIKNILANHKSAITNLKNGHIKTFDIKYKSRKNKNQFLFVDYRALKPDGKLWGRTIKTPLGMRKGEKRWFDNYMKEYELKKFGDDKGDKERKDMIITREYPGMYYLHIPYTKTIENKPIQESIISIDPGIRTFHTFYDPEGKCGKIGDNLTNHIIRLYEKIDKIQSKITKTNTKNNDLGYKKNKICRQNMRKRCAWLRTKIKNTIRDYHWKTASFYCKNYGHVIIPKLDTDSLKKRIKKDYGLSKGSPMIRRIMALSHNEFINKLLHKSKQYNTNVLIVNEAYTSVTCGNCGIKHEKLGSNKIYKCIHCKRKIDRDINGARNILIKTLSK

SEQ ID NO: 4961 - protein, 606 aa, Heliothis virescens ascovirus 3j
MPPSCKSCGVEGHSRRTSKSCGNYLPPIRQRTDCGGVSTEDFDVGVVKRGLNGVLCPLMDEDVRRRLTAEIRSDVVELSRLYVLLGVFVNHCWNAYPNDESNSVRTFQDMMTYVYALKGKGPHAQKFDDMVRYHDGITYYNGRLRNYSVQEMAKTYWTVSKTNITTHAYSRLARYFGVKRNDPTLFAAYYHKEFGDDDISRVCRFINVSSEWHSTIPMWIDIQREMYARGEQSFVIFPQPSHGLKHVTYTSKGWHELLRRVTPSTITSSWPSITDHKKELWAPYLDTSVVDMKKFGCCIQTDGVAVSLSMNRPKRKPSLRKKPISMPPEPYITDTFNEDRIVAVDPGSRVPVAACDSRTGFKRITKRWVRSHTLEWKRERYRSSKLRKIELDEAADRHRIELDRGVQITCRNGHQVKLYTDFRLKWFDARQRPFERTRKLTRLSFDKYMMTARTNERIVTETFLGDTPNDRVLVLYGAGVNFVNVACYSGRKFKHTDLLRRLRSRRNIRVRIVDESYTSKACSDCNELRNGTYTRLRINHRLRRGVCPDCNADVERDYNAAKNILVNFQRSAVCRPSPSCDSGVTSDEDSHSIRPIIQCTVSQPGS

SEQ ID NO: 4962 - protein, 605 aa, Heliothis virescens ascovirus 3j
MPPSCKSCGGEGHSRRTSKSCANYLPSIRQRSNCDGASTEDFDVGVVKRGLNGVLCPLLEENVRRRMTAEIRSDVVELSRLYVLLGVFVNHCWNAYPTDESNCIRTFQDMMNYVYALKGKGPHANKFDQMVRYHNGITYYNGRLRNYTVQEVAKTYWTVLKTNITTHAYSRLARYFGVKRNDPTLFAAYYHKEFGDDNISRVCRFINVSSEWHSTIPMWIEIQREMYARGEQSFVIFPQPSHGLKHVTYTSKGWHELLRRVTPSTITSSWASITDHKKELWAPYLDTSVVDMKKFGCCIQTDGVAVSLSMNRPKRKPIIRKPTSILIKPCVTDTFNEDRIVAVDPGSRVPVAACDSRTGFKRITKRWVRSHTLEWKRERYRSRKLRRVELDEAEDRHRVELDRGVQITCRNGHQVKLYTDFRLKWFDARQRPFERTRKLTRLSFDKYMMTARTNERIVRETFLNDTPSDRVLVLYGAGVNFVNVACYSGRKFKHTDLLHRLRSRRNIRVRLVDESYTSRACSDCNELRNGTYTRLRMNHRLRRGVCPDCNADVERDYNAAKNILVNFQRSAVCRPSPSCDSGVTTERDSHSIRTIIQCTVIEPGS

SEQ ID NO: 4963 - protein, 650 aa, Emiliania huxleyi virus 202
MPRNKKDDTRVIKCPLDKILKPGIVSIIRDIVPVYNRITISATVFLNLRIRQLVESRASSEEFAQFFQANKLVKHFMAVTSSNTGAGDLYTAFGTNFPSVTREDRPKAFSQVCMYICRNLETTATTNVWYHMKKRVCTIVSKTFGIPRNEWLQMSDEEKKNHKIHLKQVKVDVLSLEGDAFISPEQYHDWISDLRSEMKVTHVTRQLLADTRGIDVDDPNVPGMVYYMKVKPCEFIYAIATLSSRLNALTGGGYALYPIRSSMVPKYLHLDELILSDIAPGIARSSANAAAGKKRTADGSELSNKDKLTARRMIVFKHVMTPKAFNKWKNQLDWSVDTDGYGCSLHTKKKVHERPPSESPSIHNGLFKIDEFKDKFSGRYSIDDISAVGIDPGKREIVSAVDSTDYTSKYTFRKTHQDHLTGTVRHRKAMERVKSQTIFETEQDLATTSKKVVPVERFMNYATKLATSISSSSGFYEQGVYRKRKWKRHLRLQKAYSSIVNNLKKVSCYPHKPIVLAYGSWGMSTSGLPFRGLPPTIGIGMIRYLARFFPVVITPEYYTSTICPCCESNVTRCTHVEQQRASPFFENGKLKEIRGLKHCPGCNTYFNRDNMGAWNIARNFTNMYQGMAPIRVRNAAQAAEQELTNRTEVD

SEQ ID NO: 4964 - protein, 650 aa, Emiliania huxleyi virus 88
MPRNKKDDARVIKCPLDKILKPEIVSIIRDIVPVYNRIAISATLFLNLRIRQLVESRASSTEFAQFFQANKLVKYFMAVTSSTLGAGDLHAAFGTNFPSVIREDRPKAFSQVCMYICRNLEATATTNVWYHMKKRVCTVVKKTFGIPRDEWLHMSNEEKKNHKIHLKQVNVDVLSLEGDAFVSPEQYHDWISNLRSEMKVTHVTRQLLADTRGVDVDDPNVPGMVYYMKVKPYEFIYAIATLSSHLNSITGGGYALYPIRSSMVPKYLHLDELILADISPGISKGATNTAAGKKRTADGSELSNKDKLVARRMIVFKHVMTPKAFNKWENHLGWSVDTDGYGCSLHVKKKVNELPPSTHPSIHNGLIKIDAFKDKFSERYSINDLSIIGVDPGKREIVSAVDSMDYTSKYTFRKTHQDHLTGTVRHRKAMECTKPQSVFETEQDLATTSKKVVPVERFMDYATKLATSISSSSGFYEQGVYRKRKWKRHLRLQKAYSGIVNNLKMVSCHPNKPIVLAYGSWGMTTSGLPFKGLPPTIGIGMVRYLARFFPVVITPEYYTSTICPCCDSNVTRCTHVEQQRASPFFENGRLKEIRGLKHCPGCNTYFNRDNMGAWNIARNFTNMYQGMAPIRVRNAAQAAEQELTNRTEVD

SEQ ID NO: 4965 - protein, 637 aa, unidentified
  source 1..637: note = Dishui Lake large algae virus 1
MKPPDPRPIEGKHILTVKKTALRNIVGNDPMILSRIQDAVYRKHVIVQHTTHFMKLYLLSLFEKGDVLPMIDVDFIAISMRVVSNMPPEENRRGRPPNASTRALMNQLECFYKEHYEPLLGKNPEEMRTTLYRIGDMLQYEEKDILKNIKNNIFLHFTDYVKEFINKEFNLKETLSKVDAMALTEEEKRLTKRSISIELRHVKNDLLSPLGTVLTSPVKYHEWICQHKSKLIPKEKYLKNNIEYDVKAKPMDYLSSMFYVCSQLEKYGRHVHAFPLCTSTIPSYATIDTTTLIMLMIDDNALMFRKKVKESKEDVWGSFFQLGNKAFRRKDYRFHYMIKTDGVGASILFHRKDQNPDKLDDDTICTVKEKYIDEIEVPQDKNIIGIDVGLDDILYCTDGTSFYRYSANQRRVQTKTKKYMNIMDSLKKEHLVEGMSVKEWETILSLYNKYTCSFSKFKEYVEQKTTITYTLTPFYTNTLLRKLKWNCYINRQRSEAKMLNKLKEQFGEPDKAIVAIGDWDQGSYHMKGKEPTKGKGMRKVLRQGGYEVYLVDEFKTSCTCHNCHGECKKWLYRPSHKPRNLGENTLVHGLLRCTSVNGCGSLWNRDVNGCLNICMLAHKAVQKEERPLAFQRGIHIC

SEQ ID NO: 4966 - protein, 575 aa, unidentified
  source 1..575: note = Dishui Lake large algae virus 1
MEDTTKERKRPDVVQRLKDRKGKQERVVKCSLQKALKEKRLMPEIQKWVSTVSKVTNKGSLVFNRLLLHCLRNDLPLPDLQDQTLYLQCFNIGIGQVRKSIEPLRDVWENVFSGFPTIEKARGDTQAYVYASKQYMTNFKNSLVYPFERRQKAFIARWCRENGLEKDQVYAIRCAINRWGCRTDIVPQATPFVDQQRKLLGTLTEDDEVTHTWLGAHMDNVVRYYWYILCYNEQFDDARRFTLAPISSIKSHYLTIDTTVLFEMMKNCNLTSGKKDAFVELRDDHFGSCFSYSKLCRKGVYTHMLETDGASVCFHFHVPKAEKVKENRILKKSDRVIAIDPGRSNLIYAVDDTTKETYRLTRQSYYTSAGMKTMNRKASKWEKDIEGAELVYRKHSLKTTKEETWDLFLKDYSSVYDTLWNAKTEKKWGRERFKVYGLKRKTLDNFFQTMKGEKQPVIAYGAARFNPTSKNELSAPTTFVSHRCAKHFPVIMVDEYNTTKVCHCCNQKLCPVVKNQQEVRGLRWCCSTNCRTFLNRDLNAALNIARCFRSGTCRPHSLCRNSGISLVASKPLRIY

SEQ ID NO: 4967 - protein, 508 aa, unidentified
  source 1..508: note = Dishui Lake large algae virus 1
MLEADLTTREQDFAPYWSDCSKEISGGLWLPTRTGLPVSDLTSFNGSSPNLGLYWKAWSSPTQTQERTWSPTSWRFSQSLQPVTTGKESIVTGRRYRIYPDSVQKALFRKCFGAHRYFYNRAVAEINRRYKNRKAEFHKMEHCVLCNNDRLEGSFCCEKHKGTKLPWKLDVTLASLRSAVMVSDKDAKGTTMAWQMEVPYDTRQLAIKDAIAAYKACTTNLTRGNIDGFQLNYKRKSSRQICWVNDTAIVRKNGDVKIFQQRLKQNASLKFKSKDRKKVPKKFDSDAKILYDRGAYYLVTTESAKKEEHKNRKPIVALDPGVRTFQTGYSPTGEVFKAGEGRIQRMKLLHSKIDLLRSVRTRIQKPTTRHRINKRLEKIERALYGLVDDLHNHTASALVKSYDTILLPTFGTSEMLVTDDIASGVKRRMAGLSHYRFQQKLKHQCEKHGATLYLVGEEYTTQACGCCGRLKKVAGSKIYTCDNCGYTMDRDVHGARNILIKTCSTFGR

SEQ ID NO: 4968 - protein, 473 aa, Faustovirus
MHLFNEQGILEVDLQRLRKVSEAEKFTRSETGFWNQNCSVIKDKYIDNLTLTNHDNPTDVIVSRRILIKPNYLQRKLLTECFHAYRYVYNQAVELIFRILDLSRRVGCTMMTKTIKMAVYKYVKITDDIVPDFVLILPADSRKEALREAVKNYSTCITHMRRGLCKKFLLKHKRRDAMTFRIKTNAIKLEKNKLVIFRDRIIERIREVAIEREGKCTAKSVKKYNHLRYADIDKGNRSRLSPYLDENGNPISWPQITYSHGKYYLIVSGTRKAESTEDKKEICAIDPGVVNFHTIYDRETTFIEGHKLYETKLQSINQRIDKLVRAKQYVTGAKLKHMQERELKLRAKVSNIVYDFRHKLASELCNKYKVILLPKLGIKQVAKNLRKMVNRKLYALSHCKFNELIKQIARRTGTTVIHCLESYTSKTCGNCGNLQSVDNDRIFRCISCQYVCGRDENACKNILIRTLNNYLLS

SEQ ID NO: 4969 - protein, 478 aa, Faustovirus
MNYISMRLFNEQGNLKVDLQRLRKVSEAEKFTRSETGFWNQNCSVIKDKYIDNLTLTNHDNPENVIVSRKILIKPNYLQRKLLMECFHAYRYVYNQAIELIFRILDLSEKTGCKIMPSTIKTAVYKYVKITDDIVPDFVLPLPADSRKEALREAVKNYSTCITHMRRGICKKFLLKHKRRDAMTFRIKTNAIKLEKNKLVIFRDRIIERIRDVAVEREGKCTAKSIKKYNHLRYADIDKGNRSRLSPYLDENGNPTSYPIITYSHGKYYLIVSGTREAEITKDKKEICAIDPGVVNFHTIYDRETTYIEGHKLYETKLQSINQRIDKLVRAKQYVTGAKLKRMRLRELKLRAKVSNIVYDFRHKLASTLCNKYKVILLPKLGIKQVAKHLRRTVNRKLYALSHYKFNELIKQIAQRTGTTVIHCLESYTSKTCGNCGNLQSVDDDRIFRCALCQYVCGRDENACKNILIRTLNNYLLS

SEQ ID NO: 4970 - protein, 478 aa, Faustovirus
MNYISMRLFNEQGNLKVDLQRLRKVSEAEKFTRSETGFWNQNCSVIKDKYIDNLTLTNHDNSKNVIVSRKILIKPNYLQRKLLMECFHAYRYVYNQAIELIFRILDLSEKTGCKIMPSTIKTAVYKYVKITDDIVPDFVLPLPADSRKEALREAVKNYSTCITHMRRGICKKFLLKHKRRDAMTFRIKTNAIKLEKNKLVIFRDRIIERIRDVAVEREGKCTAKSIKKYNHLRYADIDKGNRSRLSPYLDENGNPTSYPIITYSHGKYYLIVSGTREAEITKDKKEICAIDPGVVNFHTIYDRETTYIEGHKLYETKLQSINQRIDKLVRAKQYVTGAKLKRMRLRELKLRAKVSNIVYDFRHKLASTLCNKYKVILLPKLGIKQVAKHLRRTVNRKLYALSHYKFNELIKQIAQRTGTTVIHCLESYTSKTCGNCGNLQSVDDDRIFRCALCQYVCGRDENACKNILIRTLNNYLLS

SEQ ID NO: 4971 - protein, 478 aa, Faustovirus
MNYISMHLFNEQGNLKVDLQRLRKVSEAEKFTRSETGFWNQNCSVIKDKYIDNLTLTNHDNPENVIVSRKILIKPNYLQRKLLMECFHAYRYVYNQAIELIFRILDLSEKTGCKIMPSTIKMAVYKYVKITDDIVPDFVLPLPADSRKEALREAVKNYSTCITHMRRGICKKFLLKHKRRDAMTFRIKTNAIKLEKNKLVIFRDRIIERIRDVAVEREGKCTAKSIKKYNHLRYADIDKGNRSRLSPYLDENGNPTSYPIITYSHGKYYLIVSGTREAEITKDKKEICAIDPGVVNFHTIYDRETTYIEGHKLYETKLQSINQRIDKLVRAKQYVTGAKLKRMRLRELKLRAKVSNIVYDFRHKLASTLCNKYKVILLPKLGIKQVAKHLRRTVNRKLYALSHYKFNELIKQIAQRTGTTVIHCLESYTSKTCGNCGNLQSVDDDRIFRCALCQYVCGRDENACKNILIRTLNNYLLS

SEQ ID NO: 4972 - protein, 473 aa, Faustovirus
MHLFNEQGNLEVDLQRLRKVSEAEKFTRSETGFWNQNCSVIKDKYIDNLTLTNHDNSTDIIISRKILIKPNYLQRELLTECFHAYRYVYNQAVELIFRILDLSEKTGCKIMPSTIKMAVYKYIKITDDIVPDFVLPLQYDSRKEALREAVKNYSTCISHMRSGLCKKFLLKHKRRDAMTFRIKTSAIKFEKNKLVIFRDRIIERIREVAVEREGKCTAKSIKKYNHLRYADIDKGNRSRLTPYLDENGNPMSWPLITYSHGKYYLIVSGTREAEITKDKKEICAIDPGVVNFHTIYDRETTVIEGHKLYETKLQSINQRIDKLVRAKQYVTGAKLKRMRLRELKLRAKVSNIVYDFRHKLASKLCNKYKVILLPKLGIKQVAKHLRRTVNRKLYTLSHYKFNELIKQIARRTRTTVIHCLESYTSKTCGNCGNLQSVDNDRIFRCALCQYVCGRDENACKNILIRTLNNYLLS

SEQ ID NO: 4973 - protein, 473 aa, Faustovirus
MHLFNKRGVLEVDLQRLRKVSETEKFTRSETGFWNQNCSVIKDKYIDNLAFTNHDNCKDVIVSRKILIKPNYLQRKLLTECFHAYRYVYNQAVELIFHILNLSRRVGCVMTTKTIKMAVYKYVKITDDIVPDFVIVLPADSRKEALREAVKNYSTCITHMRKGLCKKFLLKHKRRDAMTFRIKTNAIKLEKNKLVIFRDRIIERIREVAVEREGKCTAKSVKKYNHLRYADIDKGNRSRLSPYLDENGNPMSYPIITYSHNKYYLIVSGTRKAESIKDKKEICAIDPGVVNFHTIYDRETTVIEGHKLYESRLQSINQRIDKLVKAKQYVTGTKLKRMRERELKLRAKVSNIVYDFRHKLASKLCNKYKVILLPKLGVKQVAKNLRKTINRKLYALSHYKFNELIKQIALRTGTTIIHCLESYTSKTCGNCGNLQSVDDDRIFRCTLCQYVCGRDENACKNILIRTLNNYLLS

SEQ ID NO: 4974 - protein, 462 aa, Faustovirus
MKCSIHEYYQSILNGDLEGIFTRRNNEIKNPIRDYEFNNSARLLSLITPDQVDNINRNNIVDDALIYGIKHKLSPTVSVFGKIESNNTGFTAEDIQCSRKLRIYPTEIEKTKINKLFQISNAFYNFTIDGIENKTININNKSDIRAKSKVNDDVCETVHANAKMAYFHTRSLAAMSAVINYKSLLTNYRNGHIKHFKLSNAHSMQVAHFRSEDAKLKDNHLCIRDMKLKIRPRDLPWINTVGINQQVSIKKYNRKYYLIVPFKRRSCDNNTKGICAIDPGNRTLATYYSPDEIGKLGVNLIERVRKVNNRIDHLKRVKDTTKLVSRTRYGLKRRITKLNDKITRLVDYAQWKFAAYLTRKFRVVFIPRLANVVRGGINSTINRETRCLRHSQFITKLMHLGLVNGCHVIETKEYYTTRTCSGCGKRNENVGSSKIFGCSNCKMVMDRDINGAKNIWLRSLTN

SEQ ID NO: 4975 - protein, 305 aa, Faustovirus
MAIVEAVAAYKACQTKKKNKLLRSYTLKHRTKKNLSQHIRLDKRTIQLHKNKLCIMPDKCGDKITLSKDQLKQVKSAFNKNNPNHDIIITKQANKWYICVLIKNNKIETVKKDSLVALDPGGRTFQTYFSQNELGKFGDGFYENNIKPINERIDKLNAILPKLRGLRKRKLRNRVQQLRTKIVNKVSDLHNKVINYLTTNFTTILLPKFSAKQIATRSGRSINRMLHSLGHYKFSDKLEERCKLRNCEVIRCLESYTSQVCSSCGSMYKPFASHVYKCVGCQDNKDRDINAAKNIYLRSLTMLTK

SEQ ID NO: 4976 - protein, 463 aa, Faustovirus
MKFNIHRYYQSILNGDIESIFTKRKDEVNSPVCDYKFNNYTKLLSLTTHDEIKGIKRNETVEDSVIYETKPLTSPTISVFGKIEVDATGFVAEDVQCARKIRIYPTEMEKSKINKLFSISNAFYNLAIEGIENKTININNKTDIRQKCRVNDDVCSTVHVDAKLAYFDTRSLAAMSAVGNYKAMLTNYQNGNIKHFRLSNKHSTQIVYFSAKDAKLKNGCLCIRDMKLRLRNRDLPWLVEHGINQQVSIKRYNRKYYVVVPFKRRSLDNNAKGICAIDPGNRTFATYYSPDEIGKLGVNLIERIRKINAKIDHLRSVKDTAKLVSRTRYGLKQRIAKLSSKITRLVDYAGWKFAAYLTRRFRIVFVPRLANVVGKANSTVNRETRNLRHSEFINKLTHLGKVNGCKVVETKEYYTTKTCCRCGTRNDNVGSSKVFSCVNVACKFTIDRDVNGAKNIWLRSLTN

SEQ ID NO: 4977 - protein, 466 aa, Faustovirus
MHLFNEGGNLKVNLQELRKICESEKFQRSETGFWNQNCSIIKDKLLATEFINHDKATDTIISRKIKFKPNYLQRKLLNDCFGAYRWIYNKAIDVIFEVKKYSDKFNCIIDLKLVKKAIYGNVKINDDEIPDFIKILPSDSRKEALREAIKNYKTCLTHLNKKLCRRFLLKHKRRDDTTFRIKTNAIKLTGNKLVIFKKRILDLIEAGGLSENLRYATLNNGNLHRLKPYLNASGNPTAYPLINYSHGNYYIIVSGNRKVEQCNVKKEICAIDPGVVNFHTIYDGVVGYEGVKLYETRLEGINRRIDKITQHKQNFTGAKRKRMQLRELKLRAKVSNIVYQFRHTLASKLCAKYKVILLPKLGIKQVAKHLRRQVNRKLYALSHYKFNELIKQIASRTGTTVIHCLESYTSKTCGNCGNLQTCDVDRTFRCKVCGYVADRDENACKNILIRSLNNYILSCSSSGKRK

SEQ ID NO: 4978 - protein, 463 aa, Faustovirus
MKFNIHKYYQSILNGDIESIFTKRNGEIKDPVRDYKFNNYTKLLSLTTHDEIKGIKRNETVEDSVIYETKPLTSPTISVFGKIEVDATGFVAEDVQCARKIRIYPTEMEKSKINKLFSISNAFYNLAIEGIENKTININNKTDIRQKCRVNDDVCRTVHVDARMAYFHTRSLAAMSAVGNYKAMLTNHRNGNIKHFKLSNMHSTQIVHFRAEDARIKMGNLCIHDMKLRLRNRDLPWLVEHGINQQVSIKRYNRKYYVVVPFKRRSSDNNAKGICAIDPGNRTFATYYSPDEIGKLGVNLIERIRKINTKIDHLRSVKDTAKLVSRTRYGLKQRIAKLSGKITRLVDYIGWKFAAYLTRRFRIVFVPRLANVVGKANSTVNRETRNLRHSEFINKLTHLGKVNGCKVVETKEYYTTKTCCRCGIRNDNVGSSKVFSCVNVACKFTIDRDVNGAKNIWLRSLTN

SEQ ID NO: 4979 - protein, 464 aa, Faustovirus
MKFNIHKYYQSILNGDIESIFTKRNNEVKDPVCDYKFNNYTKLLSLTTHDEISGIKRNETVEDSVVYETKPLTSPTISVFGKLELDATGFTADDVQCARKIRIYPTETEKSKINKLFSISNAFYNLAIEGIENKTININNKTDIRRKCRVNDDVCNTVHVDAKMAYFDTRSLAAMMAVSNHKAMLTNHQNGNIKHFKLSNKHSTQIVYFSPKDAKLRDDHLCIRDMKLRIRNRDLPWLVEQGINQQISIKRYNRKYYVVVPFKRRSLDNHAKGICAIDPGNRTFATYYSPDEIGKLGVNLIEKVRKINVKIDHLNYIKDTVKLVSRTRHGLKQRIAKLSDKITRLVDYAGWKFAAYLTRRFRVIFVPRLANVVKGGRNSTVNRETRNLRHSEFINKLTHLGKINGCKVVETKEYYTTKTCCRCGIRNDDVGSSKVFSCVNAACKFTIDRDVNGAKNIWLRSLTN

SEQ ID NO: 4980 - protein, 482 aa, Faustovirus
MNIFLHYKYYDINIISMHLFNEGGNLKVNLQELRKICESEKFQRSETGFWNQNCSIIKDKLLATEFINHDKATDTIISRKIKFKPNYLQRKLLNDCFGAYRWIYNKAIDVIFEVKKYSDKFNCDIDIKLVKKAIYENVKINDDEIPDFIKILPSASRKEALREAIKNYKTCLTHLNKKLCRKFLLKHKRKDATTFRITTNAIKLTGNKLVIFKKRILDLIEAGGLSKDLRYATLNNGNLHRLKPYLDASGNPTAYPLITYSHGNYYIIVSGTRKVEQRVDKKEICAIDPGVVNFHTIYDGVVGYEGVKLYETRLEGINQRIDKITQHKQNFTGAKRKRMHLRELKLRAKVSNIVYQFRHTLASKLCNKYKVILLPKLGIKQVAKHLRRQVNRKLYALSHYKFNELIKQIALRTGTTVIHCLESYTSKTCGNCGNLQTCDVDRTFRCRACHYVADRDENACKNILIRSLNNYILSCSSSGKRK

SEQ ID NO: 4981 - protein, 445 aa, Haliotid herpesvirus 1
MSTKNAPELSTFQVRLKPTSAQKLALNLMIKVTNHAYNWCIHLVETKGFKPKQYDLQKVVAKTNSKDVDPDLRMSDDDWFFDNKLSTIKLTAIRQYASNYQIGLKKVKKREYASKMRVKEGKPALEITPGKNLPTEFKTELENEVSGCIAVQKLFVKPMSDLHIKRYKPRKPEMCLMILDASMKGPVLLARPVSHLPPLDHDMKIIKRPDKKFILCIPCEQSYTRKDFSTTEKTLAAVDPGVRTFATVYEPENNKFIEFGGEKWLSNSKIAKIQDKIDRINGEFQRAVERGDNRTADEFKRCLKKLHFKIKNKVDGLHRHVNGHIRKNYSQVAWGDMAPKQILMKDGLTHRTKRKMQMLSHGRQHEKLARIEGVTMQNEKYTSMTCSRCGYVNKKLGSAARYVCPNCEQDIGRDENASINIWRKYAGTFFRTIGGEHVYEDDVKK

SEQ ID NO: 4982 - protein, 757 aa, Ectocarpus siliculosus virus 1
MVRPSSDGNSHKKKKHKKIPPRAPPKNIPGFLQTVASLYPNQYLTASGNLPKSCKGTYCCQLFSRVRFGKEVSQQLRTRTVSVGFRAATTDEKRDTFQSKVNDAVDHLSRERVLASLFANFVFMERLQNGSALPEPDRAFFKSCLSSCILSRGGGSLNADFDRFSEITGLTRLVPPKSMNLDQQREHEAQRMATATSTRATHHAEKRRISITRWFLRGRISRGDLDCKKYATKLYNLAEKIITNFDGTPEDTQKLRTMSRAIDPGTDTNIIIDFAWQEKEFSDRDRGDGKSAETIKHLNWMFNTYVAESRRMYEEAVSRSHLFAPGKDKACRKKRDEFMKHELGEEFTYAPPKDTAVLPICSTGAVFIYIDMKTLGSWGLLHSNDAWWYKDVLRPFSKEANVKCLVNKENARYASSEHGYLSSLLESGPDKCPWMIGESFLTDGVQIKLLLKTLEHGRKAFSGSSELNEKGYNKLPRADVQLESLLGEGRGVYNISSLLKSTSIREDVVVMSADPGQAKVINVSSATARTWAKQDPGVILKTSTCVFGDDYRRDTLASRSDEYETFRRKGQPYGVAIDRLGNEKKRTSCLATFIQYCRRWCVNGPVLFRETLQTGRKFMRFDRFRATQKTLALIADKYMGHVEDTCRVMLFGKASFRAQKGRASAPRKALIREMASRGVVLMVNEYNTSKMCPGCGEDTVEDKERRIRSCKNFKIGSPEESCRLHRLTPEFEMDRDDVGSTNIGMRGFGKLLGQVWF

SEQ ID NO: 4983 - protein, 757 aa, Ectocarpus siliculosus virus 1
MVRPSSDGNSHKKKKHKKIPPRAPPKNIPGFLQTVASLYPNQYLTASGNLPKSCKGTYCCQLFSRVRFGKEVSQQLRTRTVSVGFRAATTDEKRDTFQSKVNDAVDHLSRERVLASLFANFVFMERLQNGSALPEPDRAFFKSCLSSCILSRGGGSLNADFDRFSEITGLTRLVPPKSMNLDQQREHEAQRMATATSTRATHHAEKRRISITRWFLRGRISRGDLDCKKYATKLYKLAEKIITNFDGTPEDTQKLRIMSRAIDPGTDTNIIIDFAWQEKEFSDRDRGDGKSAETIKHLNWMFNTYVAESRRMYEEAVSRSHLFAPGKDKACRKKRDEFVKHELGEEFTYAPPKDTAVLPICSTGAVFIYIDMKTLGSWGLLHSNDAWWYKDVLRPFSKEANVKCLVNKENARYASSEHGYLSSLLESGPDKCPWMIGESFLTDGVQIKLLLKTLEHGRKAFSGSSELNEEGYNKLPRADVQLESLLGEGRGVYNISSLLKSTSIREDVVVMSADPGQAKVINVSSATARTWAKQDPGVILKTSTCVFGDDYRRDTLASRSDEYETFRRKGQPYGVAIDRLGNEKKRTSCLATFIQYCRRWCVNGPVLFRETLQTGRKFMRFDRFRATQKTLALIADKYMGHVEDTCRVMLFGKASFRAQKGRASAPRKALIREMASRGVVLMVNEYNTSKMCPGCGEDMVEDKERRIRSCKNFKIGSPEESCRLHRLTPEFEMDRDDVGSTNIGMRGFGKLLGQVWF

SEQ ID NO: 4984 - protein, 432 aa, Paramecium bursaria Chlorella virus 1
MSKLTPWWSRKSQQLTKIIPWGTENVNTFQNDVIAKRVLRTRKVKLNPTKQQKMMLMKFADAARYSYNAAVSAVNDKTHNPNKIELQNAFLSLKRRDGTYNKFFQKRRWLLGCPQPIRQQAIFEAANNFKSAFTNLKNKNIDHFKMTYKTKKHQRKCGFSLGIGTHLKHNDGVLIILPRNLGQVRYFGSVPFEGKPDAECRIQRDPYGDHWLLVPVYKTTKTQTTKPIVAIDPGVRTPFACFGSNGGSKTLGEDMNAKLTDIRTRVSLVDRRISKCQDVSLKRKMREHRRRLFRKHQRVRDAYHWEIIKDITNEYSGVLLPPFETQRVSRMLKNKTNCSMLGISHFTFRMRMKGKCEEKGLLYTEPTEEYTSKTCGVCGQINYLLGSKKTFECFCGNVCDRDIHAARNILLKWLSTEAGARVVETFLASRSS

SEQ ID NO: 4985 - protein, 301 aa, Mamestra configurata nucleopolyhedrovirus B
MKKFGCCIQTDGVAVSLSMNRPKRKQTSTLPKSYVTNTFNEDRIVAVDPRSRVPVAACDSRTGFKRITKRWVRSHTLEWKRERYRSQKLRHVELNEVADRHRVELDRGVQITCRNGHQVKLYTDFRLKWFDARQRPFERTRKLTRLSFNKYMMTARTNERIVRETFLNDTPSDKVLVLYGAGVNFVNVACYSGRKFKHTDLLRRLRSRRNIRVRLVDESYTSKACSDCNELRNGTYTRLRMNHRLRRGVCPDCNADVERDYNAAKNILVNFQRSAVCRPSPSCDSGVTTDKDSHSIRPIIQ

SEQ ID NO: 4986 - protein, 564 aa, Spodoptera frugiperda ascovirus 1a
MPLSCKSCGGEGHTRRSSKSCANYLPPIRQRRNSGDVDHYTQDFDVGVVKQGLDGTICPLLRGDVRQRLTAEIRSDVVELSKLYILLGVFVNHCWNAYPDDESNSVRTFQDMMNYVYAIRGKGPHAKKFDDMVRYHGNIRRYDGRLRSFIVHEVAKTYWTVLKTNITTHAYSRLARYLGVKRNDPTLFAAYYHKEFGDDDSISRVCRFINVSSDWHSTIPMWIEIQRDMYARGERSFVIFPQPSHGLKHVTYTSRGWHELLRRVDPSNVTSNWPSITDHKKELWAPYLDTCVVDMKKFGCCIQTDGVAVSISMNRPKRTSVRRKAALPKSYTIDAFFEDRIVAVDPGSRVPVAACDSRTGFKRITKRWVRSHTLEWKRDRYRSRKLRRVELNEATDRQRVELDRGVQITCRNGEQVKLYTDFRLKWFDARQLPFERTRKLTRLSFNKYMMTARTNERIVRETFLSDTPSDRVLVLYGAGVNFVNVACYSGRKFKHTDLLRRLRAKRNIRVQLVDESYTSKACSECNELRNGTYTRLRMNHDFVAASVQTATPTSRGTTTPPKIY

SEQ ID NO: 4987 - protein, 606 aa, Spodoptera frugiperda ascovirus 1a
MPLSCKSCGGEGHTRRSSKSCANYLPPIRQRRNSGDVDHYTQDFDVGVVKQGLDGTICPLLREDVRQRLKVEIRSDVVELSKLYILLGVFVNHCWNAYPDDESNSVRTFQDMMNYVYAIRGKGPHAKKFEDMVRYHGNIRRYDGRLRSFIVQEVAKTYWTVLKTNITTHAYSRLARYLGVKRNDPTLFAAYYHKEFGDDDSISRVCRFINVSSDWHSTIPMWIEIQRDMYARGEQSFVIFPQPSHGLKHVTYTSKGWHELLRRVDPSNVKSNWPSITDHKKELWAPYLDTCVVDMKKFGCCIQTDGVAVSISMNRPKRTSVRRKAALPKSYTIDAFFEDRIVAVDPGSRVPVAACDSRTGFKRITKRWVRSHTLEWKRDRYRSRKLRRVELNEAADRQRVELNRGVQITCRNGEQVKLYTDFRLKWFDARQLPFERTRKLTRLSFNKYMMTARMNERIVRETFLSDTPSDRVLVLYGVGVNFVNVACYSGRKFKHTDLLRRLRAKRNIRVQLVDESYTSKACSECNELRNGTYTRLRMNHRLRRGVCPDCNADVERDYNAAKNILVNYQRSAVCRPSPSCDSGVATDTDPHSIRSIFQCAVSEPGS

SEQ ID NO: 4988 - protein, 548 aa, Paramecium bursaria Chlorella virus AR158
MGCSQPLETPRNIISATIRPSGSGPMRESSGPSTPQEASVATNSRNVRNPKRPITVTAGSVPQSNTMTSNDRSSPCGPSSQDTESSPTSVPESTGNVRALKPFWNPRCTELADVLWLPTETVSPVLASNSSSGSFEPTEPTSWFNTKTWTPHRQQSSQKTSSQSPLFSPANITGSVAMPKKAMISRKVEIFPNVKDAMVLKRWCGLYRRMYNLAIEKMLDTGRWHWKGHKVLTTYDNIPKNEKVRLLPTNIRKEAYREASTAMAKAPHKNTVKFKTLKRNGRSLRVFGAVSIVDTPDGKRIKLTDSQKHKQLSKELIGFDQKNLADIRIGSSSQIVYDGKWWLLSPFEVERSNVPKKHAVALDPGVRTFQTTYSPDGTSKKLGDQASCRIFRLMKYIDKLAVFKDKRTRGKRLRLERRVGNLVDEMHWKIARELATDYDTIIIPPFETQKMAKKWKNGRYRKINKTAVRMMLRLAHYRFRERLIHVANKLGTRVVICTEEYTSKTCGNCGVVNADLGSAKKFKCPRCHIHVDRDGNGARNILIKSVCC

SEQ ID NO: 4989 - protein, 379 aa, Paramecium bursaria Chlorella virus AR158
MLMKYANAARYSYNIAIAAVNDKTHKANKIELQNAFLSLKRRDDGSYNQFFQKRRWLLATPQPIRQQAIFEAAKNFKAAFTNLKNKNIDHFKMKFKTKKHQRQHGFSIGIGTHLKHNDGVLSILPRSLGQMRYFGSLPFEGKPDAECRIQRDPYGDHWLLIPVYKITKTQTTKPIVAIDPGVRTPFACFRSDGDSKCIGEDMNAKLVDIKTRVSIVDRRISKCQDVALKRKLREHRRVLFRKHQRVRDAYHWKIINDITDECSGVLLPPFETQRVSRMLKAKTNCSMLGISHYTFRMRMKDKCEEKGLLYDEPTEEYTSKTCGVCGLINYLLGSKKIFECFCGNVCDRDVHAARNILLKWLSSEAGARVAETFLASRSS

SEQ ID NO: 4990 - protein, 608 aa, Heliothis virescens ascovirus 3e
MPPSCKSCGGEGHSRRSSKSCLNYLPSIRQRSNCDDVSTEDFDVGVVKRGLNGVLCPLLDEDVRRRLTAEIRSDVVELSRLYVLLGVFVNHCWNAYPNNESNGVRTFQDMMNYVYALKGKGPHAHKFDDMVRYHDGITYYNGRLRNYSVQEMAKTYWTVLKTNITTHAYSRLARYFGVKRNDPTLFAAYYHKEFGDDDISRVCRFINVSSDWHSTIPMWIEIQREMYARGEQSFVIFPQPSHGLKHVTYTSRGWHELLRRVTPSNITSNWPSITDHKKELWAPYLDTSVVDMKKFGCCIQTDGVAVSLSMNRPKRKPALRKKPISTLPKSYVTDTFNEDRIVAVDPGSRVPVAACDSRTGFKRITKRWVRSHTLEWKRERYRSRKLRRVELDEAEDRHRVELDMGVQITCRNGHRVKLYTDFRLKWFDARQRPFERTRKLTRLSFDKYVMTARTNERIVRETFLNDTPSDKVLVLYGAGVNFVNVACYSGRKFKHTDLLRRLRTKRNIKVRLVDESYTSKACSDCNELRNGTYTRLRMNHRLRRGVCPDCNADVERDYNAAKNILVNFQRSAVCRPSPSCDSGVTTERDSHSMTIRIIFQCAVSELGS

SEQ ID NO: 4991 - protein, 608 aa, Heliothis virescens ascovirus 3e
MPPSCKSCGGEGHSRRSSKSCANYLPSIRQRSNCDGASTEDFDVGVVKRGLNGVLCPLLEEDLRRRLTAEIRSDVVELSRLYVLLGVFVNHCWNAYPNDESNSVCTFQDMINYVYALKGRGPHAHKFDEMVRYHNGITYYNGRLRNYTVQEMAKTYWTVLKTNITTHAYSRLARYFGVKRNDPTLYAAYYHKEFGDDDISRVCRFINVSSDWHSTIPMWIEIQREMYARGEQSFVIFPQPSHGLKHVTYTSRGWHELLRRVTPSNITSNWPSITDHKKDLWAPYLDTSVVDMKKFGCCIQTDGVAVSLSMNRPKRKPALRKKPISTLPKSYVTDTFNEDRIVAVDPGSRVPVAACDSHTGFKRITKRWVRSHTLEWKRERYRSRKLRRVELDEAEDRHRVELDMGVQITCRNGHRVKLYTDFRLKWFDARQRPFERTRKLTRLSFDKYVMTARTNERIVRETFLGDTPSDRVLVLYGAGVNFVNVACYSGRKFKHTDLLRRLRSRRNIRVRLVDESYTSKACSDCNELRNGTYTRLRMNHRLRRGVCPDCNADVERDYNAAKNILVNFQRSAVCRPSPSCASGVTTKRDSHSMTIRPIFQCALSEPGS

SEQ ID NO: 4992 - protein, 608 aa, Heliothis virescens ascovirus 3e
MPPSCKSCGGEGHSRRSSKSCLNYLPSIRQRSNCDDVSTEDFDVGVVKRGLNGVLCPLLDEDVRRRLTAEIRSDVVELSRLYVLLGVFVNHCWNAYPDNESNGVRTFQDMMNYVYALKGKGPHAHKFDDMVRYHDGITYYNGRLRNYSVQEMAKTYWTVLKTNITTHAYSRLARYFGVKRNDPTLFAAYYHKEFGDDDISRVCRFINVSSDWHSTIPMWISIQREMYARGEQSFVIFPQPSHGLKHVIYTSRGWHELLRRVTPSNITSNWPSITDHKKELWAPYLDTSVVDMKKFGCCIQTDGVAVSLSMNRPKRKPALRKKPISTLPKSYVTDTFNEDRIVAVDPGSRVPVAACDSHTGFKRITKRWVRSHTLEWKRERYRSRKLRRVELDEAEDRHRVELDMGVQITCRNGHRVKLYTDFRLKWFDARQRPFERTRKLTRLSFDKYVMTARTNERIVRETFLNDTPSDKVLVLYGAGVNFVNVACYSGRKFKHTDLLRRLRSRRNIKVRLVDESYTSKACSDCNELRNGTYTRLRMNHRLRRGVCPDCNADVERDYNAAKNILVNFQRSAVCRPSPSCDSGVTTERDSHSMTIRIIFQCAVSELGS

SEQ ID NO: 4993 - protein, 606 aa, Heliothis virescens ascovirus 3e
MPPSCKSCGGEGHSRRSSKSCLNYLPSIRQRSNCDDVSTEDFDVGVVKRGLNGVLCPLLDEDVRRRLTAEIRSDVVELSRLYVLLGVFVNHCWNAYPNNESNGVRTFQDMMNYVYALKGKGPHAHKFDDMVRYHDGITYYNGRLRNYSVQEMAKTYWTVLKTNITTHAYSRLARYFGVKRNDPTLFAAYYHKEFGDDDISRVCRFINVSSDWHSTIPMWIEIQREMYARGEQSFVIFPQPSHGLKHVTYTSRGWHELLRRVTPSNITSNWPSITDHKKELWAPYLDTSVVDMKKFGCCIQTDGVAVSLSMNRPKRKPALRKKPISTLPKSYVTDTFNEDRIVAVDPGSRVPVAACDSHTGFKRITKRWVRSHTLEWKRERYRSRKLRRVELDEAEDRHRVELDMGVQITCRNGHRVKLYTDFRLKWFDARQRPFERTRKLTRLSFDKYVMTARTNERIVRETFLGDTPSDRVLVLYGAGVNFVNVACYSGRKFKHTDLLRRLRSRRNIRVRLVDESYTSKACSDCNELRNGTYTRLRMNHRLRRGVCPDCNADVERDYNAAKNILVNFQRSAVCRPSPSCDSGVTTERDSHSIRPIIQCAVIELGS

SEQ ID NO: 4994 - protein, 608 aa, Heliothis virescens ascovirus 3e
MPPSCKSCGGEGHSRRSSKSCLNYLPSIRQRSNCDDVSTEDFDVGVVKRGLNGVLCPLLDEDVRRRLTAEIRSDVVELSRLYVLLGVFVNHCWNAYPNNESNGVRTFQDMMNYVYALKGKGPHAHKFDDMVRYHDGITYYNGRLRNYSVQEMAKTYWTVLKTNITTHAYSRLARYFGVKRNDPTLFAAYYHKEFGDDDISRVCRFINVSSDWHSTIPMWIEIQREMYARGEQSFVIFPQPSHGLKHVTYTSRGWHELLRRVTPSNITSNWPSITDHKKELWAPYLDTSVVDMKKFGCCIQTDGVAVSLSMNRPKRKPALRKKPISTLPKSYVTDTFNEDRIVAVDPGSRVPVAACDSHTGFKRITKRWVRSHTLEWKRERYRSRKLRRVELDEAEDRHRVELDMGVQITCRNGHRVKLYTDFRLKWFDARQRPFERTRKLTRLSFDKYVMTARTNERIVRETFLGDTPSDRVLVLYGAGVNFVNVACYSGRKFKHTDLLRRLRSRRNIRVRLVDESYTSKACSDCNELRNGTYTRLRMNHRLRRGVCPDCNADVERDYNAAKNILVNFQRSAVCRPSPSCDSGVTTERDSHSMTIRIIFQCAVSELGS

SEQ ID NO: 4995 - protein, 572 aa, Helicoverpa armigera granulovirus
MPVCKSCGGLDHQRRSSTKCANFLPQVRKRKLEPQQVNLDLQVYVVKRGLQSALCPLLSDDDRNRLLYEIRRDVRDLSRVYIELGILFNYYMKRCDTLPDKPDVLNFFYAMKGKGPYAACYKHLAGDQVYDGKLRSFVVQELAKQYETLIHTNIETHAYSRLARYFGVKKNDHGLFLAYYKKDFSQATEDMIRVCQIINVDSCKKNWWSTVPLWLKIQQDLFDRDNVESFRLFPQPSYGLKHLTYTSRGWHELLRRVKPDSVPSHWPNIQDHIKELWAPWLKSTKNFGCCLQTDGVSVSLSMNRWIKKVTKNGITKEVVIKKWKPSYDKLIAVDPGSRVPVAAFNSHGFYKRVTSKFVKSHSLDWKRERVRTKLTKSSETAEAKDRERVQTTCNIVLSSKNTSHVVEYTVFRLKWFDVRQKPYETHSKLTRLMFDKYINTAKLQEKIVKEVFDGGGVEKTLVLYGAGSKFMNAAQFSGRKFKHDALLKKLRQKRNIHVEIVDESYTSQACSTCNQQTGEFSKIVMDHKKRVGVCPNCASRFDRDQNAAKNILINFMRSTVCRPRCSYTKRVS

SEQ ID NO: 4996 - protein, 576 aa, Helicoverpa armigera granulovirus
MPVCKSCGGLDHQRRNSINCANYLPPVRKRKLEPAQENLELQIYVVKRGLQSALCPLLSDEDRNRLLYEIRRDVRDLSRVYIELGILINYYMKRCDTLPDKPDVLNFFYAIKGKGPYAACYKHLAGDRVYDGKLRSFVVQELAKQYETLIHTNIETHAYSRLARYFGVKKNDHGLFLAYYKKDFSQATEDMIRVCQIINVDSCKKNWWSTVPLWLKIQQDLFDRDNVESFRLFPQPSYGLKHLTYTSRGWHELLRRVKPDSVPSHWPNIQDHIKELWAPWLKSTKNFGCCLQTDGVSVSLSMNRWVKRVTKSDGVIKEVVIKKWKPSYDKLIAVDPGSRVPVAAYDSNGVYKRVTSKFVKSHSLEWKRDRVRTKHTKSSELAEAKDRESINQACNIVLSSKNTSHVVEYTVFRLKWFNVRQTPYDTHSKLTRLKFDKYINTAKLQEKIAEEVFDGGGVEKTLVLYGAGSKFMNAAQFSGRKFKHDALLKKLRHRSNIHVEIVDESYTSQACSTCNQQTGEFSKIVMDHKKRVGVCPNCASRFDRDQNAAKNILINFMRSAVCRPRCSYTKKGIVAS

SEQ ID NO: 4997 - protein, 645 aa, Paramecium bursaria Chlorella virus NY2A
MKCPRKMSKKPQNSLLPEELEKSSESVMPLSDDGRKRRKSKASSHLLEEDSIMSKTFSASFVLQLMTRLFLEDRSRFCMLVSLLRSREMTFKDKSISSKKNIQTLKLSQTSQVVSTGNVKASGSSWISRVPEVSNELSWRSVIDSADLHSSSSNMSSVSMAPSSKLSDLRNLLQNKNSKKTSSALSKCSAVEEMEKDDTKGRKKTKIPKNHVIATRIIKIRPTKSQKQQIDKIAGVVRFCYNASINEINKMRCHEISWPSGKLDQHLRNKFSIGKHNDIEQYISIHGNNIEPEQIIETTKMNTETRKKEPSRRYINPFFLGKLWLSECPKDFRARATFKAADAYKTSLTLWRKGLIRSFEMKFSTKRRELDRGYCFGIEKKVKFEDTGLKKRDGKLIITGIDGDIRFFEKPPINKEPVAGCELSKDSCGDYYLHVPIFRKKKERKGDNFVAIDPGGVVPWAFYASKGESGCLGTEMNERMSNVSKKISTIDKKLSGQPKGDKNSNDVIERRKLFRKKKRIRDHEHYRVINFLTDRYDGIILPKLKTKNISKALKSKANHDMFDISHYTFLRRVGERCIESDTILEHPGEQWTSKTCGRCGKSNLPGRERRGTFREYKCLYCGLHAHRDVHAARNIFMKWYIELKK

SEQ ID NO: 4998 - protein, 432 aa, Paramecium bursaria Chlorella virus NY2A
MTLKPWWSNKSQQLTKIISWNPTNTNIFQNDTTIKKVLRTRKVKLNPTKQQKMMLMKFADAARYSYNIAIAAVNDKTHKANKIELQNAFSSLKRRDDDSYNQFFQKRRWLLATPQPIRKQAIFEAAKNFKAAFTKLKNKNIDHFKMKFKTKKHQRQHGFSLGIGSHLKHDNGVLTILPRSLGQMRYFGFLPFEGKPDAECRIQRDPYGDHWLLVPVYKTTKTQISKPIVAIDPGVRTPFACFRSDGDSKCIGEDMNAKLIDIKTRVTIVDRRISKCQDGSLKRKLREHRRVLFRKHQRVRDAFHWKIINDITDECSGVLLPPFETQRVSRMLKAKTNCSMLGISHYTFRMRMKGKCEEKGLLYDEPTEEYTSKTCGVCGLINYLLGSKKTFECFCGNVCDRDVHAARNILLKWLSSEAGARVAETFLASRSS

SEQ ID NO: 4999 - protein, 645 aa, Paramecium bursaria Chlorella virus NY2A
MKCPRKMSKKPQNSLLPEELEKSSESVMPPSDDGRKRRKSKASSHLLEEDSIMSKIFSASFVLQLMTRLFLEDRSRFCMLVSLLRSREMTFKDKSISSKKNIQTLKLSQTSQVVSTGNVKASGSSWISRVPEVSNELSWRSVIDSADLHSSSSNMSSVSMAPSSKLSDLRNLLQNKNSKKTSSALSKCSAVEEMEKDDTKGRKKTKIPKNHVIATRIIKIRPTKSQKQQIDKIAGVVRFCYNASINEINKMRCHEISWPSGKLDQHLRNKFSIGKHNDIEQYISIHGNNIEPEQIIETTKMNTETRKKEPSRRYINPFFLGKLWLSECPKDFRARATFKAADAYKTSLTLWRKGLIRSFEMKFSTKRRELDRGYCFGIEKKVKFEDTGLKKRDGKLIITGIDGDIRFFEKPPINKEPVAGCELSKDSCGDYYLHVPIFRKKKERKGDNFVAIDPGGVVPWAFYASKGESGCLGTEMNERMSNVSKKISTIDKKLSGQPKGDKNSNDVIERRKLFRKKKRIRDHEHYRVINFLTDRYDGIILPKLKTKNISKALKSKANHDMFDISHYTFLRRVGERCIESDTILEHPGEQWTSKTCGRCGKSNLPGRERRGTFREYKCLYCGLHAHRDVHAARNIFMKWYIELKK

SEQ ID NO: 5000 - protein, 432 aa, Paramecium bursaria Chlorella virus NY2A
MTLKPWWTKTSQQLTHIIPWKSTNTNIFQNDANIKKVLRTRKVKLNPTKQQKLMLMKYANAARYSYNIAIAAVNDKTHKANKIELQNAFLSLKRRDDGSYNQFFQKRRWLLATPQPIRQQAIFEAAKNFKAAFTNLKNKNIDHFKMKFKTKKHQRQHGFSIGIGTHLKHNDGVLSILPRSLGQMRYFGSLPFEGKPDAECRIQRDPYGDHWLLIPVYKITKTQTTKPIVAIDPGVRTPFACFRSDGDSKCIGEDMNAKLVDIKTRVSIVDRRISKCQDVALKRKLREHRRVLFRKHQRVRDAYHWKIINDITDECSGVLLPPFETQRVSRMLKAKTNCSMLGISHYTFRMRMKDKCEEKGLLYDEPTEEYTSKTCGVCGLINYLLGSKKIFECFCGNVCDRDVHAARNILLKWLSSEAGARVAETFLASRSS

SEQ ID NO: 5001 - protein, 395 aa, Paramecium bursaria Chlorella virus NY2A
MRCHEISWPSGKLDQHLRNKFSIGKHNDIEQYISIHGNNIEPEQIIETTKMNTETRKKEPSRRYINPFFLGKLWLSECPKDFRARATFKAADAYKTSLTLWRKGLIRSFEMKFSTKRRELDRGYCFGIEKKVKFEDTGLKKRDGKLIITGIDGDIRFFEKPPINKEPVAGCELSKDSCGDYYLHVPIFRKKKERKGDNFVAIDPGGVVPWAFYASKGESGCLGTEMNERMSNVSKKISTIDKKLSGQPKGDKNSNDVIERRKLFRKKKRIRDHEHYRVINFLTDRYDGIILPKLKTKNISKALKSKANHDMFDISHYTFLRRVGERCIESDTILEHPGEQWTSKTCGRCGKSNLPGRERRGTFREYKCLYCGLHAHRDVHAARNIFMKWYIELKK

SEQ ID NO: 5002 - protein, 571 aa, Pseudalatia unipuncta granulovirus
MPLCKSCGGLDHQRRTSTKCANYLPQVRKRKLEPHQENLELQIYVVKRGLQSALCPLLSDEDRNKLLYEIRRDVRDLSRVYIELGIVMNYYMKRCDVLPDKPDVLNFFYAMKGKGPYAACYKHLAGDRVYDGKLRSFVVQELAKQYETLIHTNIETHAYSRLAKYFGVKKNNDGLFQAYYKKDFSHATEEMKQICQVINAESCKKDWWNTIPLWLKIQQELFDRDKVESFRLFPQPSYGLKHLTYTSRGWHELLRRVKPDTTPSSWMSIDDHIKELWEPWLKSTKNFGCCLQTDGISVSLSMNRWVKKVTKNGETKEVVIKKWKPSYDKLIAVDPGSRIPVAAYNSNGVYQRITSKYVKSHSLEWKRDRVRNKLTKSSEMAEAKDRERVQAACSIVLSSKNTSHVVEYTVFRLKWFNVRQQPYEIHSKLTRLKFDKYINTGKVQEKIVKQVFDGGGVEKTLVLYGAGSNFMNTAQFSGRKFKHNALLKKLRQKRNIHVEIVDESYTSQACSACNHKSGVFSKISMDHKRRRGVCPNCSSSFDRDQNAAKNILINYLRSAVCRPRCSIRRVS

SEQ ID NO: 5003 - protein, 416 aa, Cafeteria roenbergensis virus
MNIKNYHWFKNKKRKNINTDGWFNLKSINNKGFNDYDNIEKPINKFLCCKTIEIYPNLEQKNIILKWMDLFINMYNHTNYFINNNIYDFTNRKIKSNVKEILNFRKLRDNYIKNKKNETCKDEINKHMLDEAINHCVSKHKSCITNYFSKNIKFFRIRNMKKNRRKKILIIEKGLFSKKKNGFCLTKLQEIKSSESIGVNKTSILQYDKHLNKFTLFIPIEKNTTNIENRTKCGIDPGIRTFLTCYSKKEILEIGENCYEKYKNNYKKIDKTRELFDKKEINKKQFTKSINHNFDKIRNLTKDLHFKVSSYLCKKFNIITIGKISTSSIVLNTNNLNKISKRCMLSLSHFKFREILEYQCNKYNTQLNIVDESYTTKTCSNCKELNNIGSSKKYQCKSCNFKCDRDINASINIYLK

SEQ ID NO: 5004 - protein, 526 aa, Megavirus chiliensis
MFWNNQCAKLSKSLWIPSNIINLKSNKKKYFKCDNPNISFNYFTDGIKINKKIKFNDIKVTDNHDKKEKLRNKLIKTENTRYIKEQNNQKCKLNKQELNDKHKKFLDKIEIKVNQLDGFIRSRRIQILPNKKQQNIIQKWIYDTTSIYNKLVSSFNQIYDKCQKIVDNMNVENKFYHLGKIIKQNTEFPINFHKLRALKCSDFIQDYDRIPYCVIADIIKEFVSNIKSCITKISKGLITEFKFKPRKYNRIFSYIPLESHYTTVRGFYPSIFGKIKTNEKIFSWLDIKHDYKLIYDKYSNKYYIHVPKYVYRNDLTIKKPIAIMDPGARTFQTIYGLDHVVTIGDDLGSTFKKRLLKIDNLKSKLSKPGKYKHNKKLDRKTKVKKWKYKRAIDRHHKKMDHIQQELHYKTANYLCSHYDRVVVTNFSSKKVGSKKNDLDAITKRILGKLSHYRFRQRLLTKCEEYGSQYYEVDESFTSKTCCKCGNIHKTLGSSKIYDCIKCKNKIDRDVNASICILIKNKDILLK

SEQ ID NO: 5005 - protein, 493 aa, Megavirus chiliensis
MVYIKNRIPIHYPNKNCGLPNWVPSINNYYDCLNTNSWFDMNICKNPNKSSVKRHLIDAPIVPNESYKQQMKSIKRCKSNKEPVFIYTRKIRIYPTDDQKCILEEWFWAATRMYNITVKYIRDFLFKDHKLTCPFASKDILINFPFRTVLKEDRDKLMKSMKNPIVGHLLDEIIAQVVSNYKAAISNILVGNIKKFKISTWKYIREKYILKIEKNLFSNGTFCSRTFKELKSSEPLINIQHTCTLQYNRDIGKYILLVPTHKETKSYVTNDLDCGIDLGVRTFATVYSRNNVVTIGNKFKKIDSCHKKIDKINELLDSDNNKCKLRKAKRKYYRRIKDIITDMHYKSAYYLVTNYDNIHIGKLSTKGILSKNNKKISRHTKRMVGVLSPYLFRQRLNHMAHKYGATVFEVNEYLTTKTCSNCGKINELEAKKVHKCKCGMKTDRDVNAAKNILKVGYQYNSTLHQVNDIDIIETDNHIVTFNKVIKEYEVFEV

SEQ ID NO: 5006 - protein, 446 aa, unidentified
  source 1..446: note = Abalone herpesvirus Victoria/AUS/2009
MSTQTAPELSTFQVRLKPTPAQKLVLNLMIKVTNHAYNWCIHLVETKGFKPKQYDLEKVVGKTNSKDVDPDLRMPDDDWFFDNKLSRIKTRAVRQYASDYQIGLKKVKKREYASKMRVEEGKSALEITPGKNLPTEFKTELENEVNGYIAFQKECVNPMSELQIKRYKPKKPEMCLMIFNTSMKGPVLLSRPVSRLPPLDHDMKIIKRPDKKFILCIPCKQSYTRKDFSATEKTFAAIDPGIRTFATVYEPENNNFIEFGNESWFKSSKIQKIQKQIDETNALLTKVRQRGRGAAIIENYERRLKKLHFKIKKKVDGLHGKINGHIRKNYSQVAWGDMAPKQILMKDGLTHGTKRKMQMLSHGRQHEKLARIEGVTMQNEKYTSMTCSRCGYVNKKLGSASRYVCPNCEQDIGRDENASINIWRKYTGTFFRTIGGEHVYEDDVKK

SEQ ID NO: 5007 - protein, 526 aa, Acanthamoeba polyphaga
MFWNNECTKLSKSLWIPSKTINLKQNKKKYFKCDNPNITFNYFTDNTKINKKIKFNEIKISDNHNKKEKLRNKLIKTENTRYLKEQNNKKCKLNKDQLEEKHKNFLDKIELKVNQLDGFIRSRKIQLFLNNKQKNIIQQWIYDTTSIYNKLVCNFSQIYHKYQTIVNNMDVQNKSYHLGKLIKQNTEFPINFHKLRALKCNDFIQDYNRIPYCVVADIIKEFVTNVKSCITKISKGQITEFKFKYKKYNRVYSSIPLESHYTTGKGFYPSIFGEVKTNENNFSWLDVKHDYKLIYDKYSNKYYIHVPKYVYRNKPLMRKPIAIMDPGARTFQTVYGLDHFITIGDDLGSTFKKRLLKIDNLKSKLSKPGKYKFNKKLGKKTKVKKWKYKRAIDRHHKKMDHIQQELHYKTANYLCSNYDRIVVTNFSDKKIGSKKNDLGAITKRILGKLSHYKFRQRLQTKSEEYGCQYYEVDESFTSKTCCKCGNIHKTLGSSKIYDCTKCKNKIDRDMNAAICILIKNKNILLK

SEQ ID NO: 5008 - protein, 424 aa, Acanthamoeba polyphaga
MYKKNSKILRTKAKKGCIHQISKNKSGSKTTKNKNQCGGKLYNKYFCKKHKHIKPKLDLPLGFQFWRNKMIKKNNNLSESEKWLSEIPYDTRQLVIKNILANHKSAITNLKNGNIKTFDIKYKSRKNKNQFLFVDYRALKPDGKLWGRTVKTPLGMRKGEKRWFDNYMKEYELKKFGDDKGDKERKDMIITREYPGMYYLHIPYTKTITKKPIQESIISIDPGIRTFHTFYDPEGKCGKIGDNLTNHIIKLYEKIDKIQSKITKTNTKNNDLGYKKNKLCRQNMRKKCAWLRTKIKNTIRDYHWKTASFYCKSYGHVIIPKLDTDSLKKKIKKDYGLSKGSPMIRRIMALSHNEFINKLIHKSKEYNTNVLIVDEAYTSVTCGNCGIKHGKLGSNKIYKCVHCKKKIDRDINGARNILIKTLSK

SEQ ID NO: 5009 - protein, 670 aa, Pandoravirus dulcis
MASRPRRPRAADATSRRPFWFDAARTPYLARHLPHGIYTASPRSPLSDVCESGWLKADMARRAADPPPVEFRVTHPPEPSAAARDAANKAARASKRRKTAKSVKTKDVPRRIFSLRLDPTPAQKRFFQRAIGIACLAKRLAYRHLGDQRLPVTAKRINDLKKKICTEHFQTRVLTGEVSAKGKPRFHKQKADQPNTFLPEKTRRRLYEQDLRERAKVHRDTTEAAWCAERKWKRSRKTWTPPLDQRPIPAVVRCNAVIRFCQTVSTIQALVEEEGIVWDARSAASRVSPPIARSGRARVQSATSKKRKRTKEPNAPTTTAGGPPRRPRPSMGPRQVKPTDRNRTRQSFSIDATPGNANPYSARWDIVGDDRVHFMGTAVRLWGKPAKRRRELARLSARMPDGQRATGQQVIVRYESGRYHLLVQCLFAEPPKRAAEPDRAVCAVALDPGVRTFHGMYDLDGRFGEIGAGQIQQIVRIAKRAGRIRSHIDRHLQDRRPGDHNKAKRKRARKKVRAAMLKTRDLKSDAHWKTAKSLCERYDHVVIPRLPVAKMVQTLARSTSRQLMHWSHYQFRQRLQHKAAQLGVCVHVVNEAYTSMTCGRCLWIEESFRRNSSKHFECRRCGYAADRDLNAARNIMLKTIEAAVGTLEAVPPRVDVGGAAGLALAATTID

SEQ ID NO: 5010 - protein, 657 aa, Pandoravirus dulcis
MDSHAAGPSTAPAALRRPPWFDPQRTADLARRLSDQPDLALPPENVLPVGWVHMTMSRPPPSAAVPVGFEVVERPSASREEVIASSKKRRKAKRASASCNTKVDPAKTDRRVFALRIRPTTAQKRLFQRAFSIACLAKRLAYKFIGDQRDGITKTRLYAIKQAICTENIQSRERVNPDDPEDKRMRIVKRTENTTLPPATRRILFEQRLPKGDRLISSVRTNAVIQFCHAINATKALVEEKTINWDRAAQAHERYLMMREDTLVPITTPQTASASTPTAKRRPAATKRKRGNREDTDEGIRTDRYGVARMWTCRHPPRGDRPEMRPRQVKPPDRNRPRHSFSVDAHPRKTNPDSFTVRWDSKECRDNSTVVFMRQKVALWGCPSKRKRQLDRLTARMPNGEQASRTQTTLRYADGRYHLMIQCLSDKVPPRDRRPVRAVALDPGVRTFMASYDTDGRFGTVGDGQIGRIIKVAKRADRIKSHIDTRLVNQGFTNDDDNKARRKRARKRARQLNAKCRDLKADAHWKTARALCQRYDHILLPKFNSRAASQALDKTTTRQMLHWSHYEFRQRLQHKAEATGARVHLVSEHYSSMTCGRCLYIEESFRKNGSKRFECRNCGYAIDRDANGARNILIMNAERYIGRLEVSPLGSDAVAID

SEQ ID NO: 5011 - protein, 553 aa, Mimivirus terra2
FYEISNNVMAKTTNGKFWNDECEKVSDLLWKPNLIVNHKPQERINFKCDNKYITFNYYSNNVPINDQLKFKDIPQSNNTDKKNKLMDKLLKIEDSRYKKDIESNKTRKIKLTKEQLTAKHNTQLLKIQNKISQLDGFIRSRRIQLLPNDFQKHILDIWFNETTIIYNQLLTEFAQYYAKFKEIASDNKELVNLLKTNTEFPLSLQKLRNLKIHDIINIYLEDQLIHKLETPFCVIANTIKEFVANVKGNLTKLVENKIDRFTFKHKNFNRKIRTISIDSKYVSENSFYPDKLGKLMQTYEDLKGFSWQNVKHDFKIIYDKYDDKYYAHIPKYVYRNLNILNKKPIAVMDPGERTFQTLYGLDHVISIGDNLRETISKRLLRIDDLKSKLDTPGSKKHNLKLNRKTRVRKCRYKKAIDRHHKKIEHLQRELHYKTAIYLCENYQRIMVTDFSSKKVSSKDGDLDAMSKRILGKISHYRFRQRLQQKCEEFNCQYLEVNEAWTSKTCCNCGYIHAKLGTSKIYDCPKCKQKRDRDVNGAINILLKNRKLVLIEDQ

SEQ ID NO: 5012 - protein, 533 aa, Mimivirus terra2
YKEILFINNHKIIMKEAVKNVKPKVPAKKRIITGNKTKKKVFVKKKPPDKKPLKKPVKKTVKTDKPKSIYVPNKDLKISKWIPTPKKEFTEIETNSWYEHRKFENPNKSPVQTYNKIVPVVPPESIKQQNLANKRKKTNRPIVFISSEKIRIYPTKDQQKILQTWFRLFAYMYNCTIDYINSKKVVLESGRINVAATRKVCNKISVRKAQKTIRDNLIQSTNPSIMTHIIDEAIGLACSNYKTCLTNYIERHIKKFDIKPWNMSKRKKIIIIEANFFKKGTFCPTVFPKMESSKPLTMIDKTVTLQYDSDTRKYILFVPRVTPKYSVNKEKNSCGIDPGLRDFLTVYSENETQSICPIEIVVNTTKNEYKKIDKINEIIKTKPNLNSKRKKKLNRGLRKYHRRVTNKMKDMHYKVSHELVNTFDKICIGKLNVKSILSKANTVLKSALKRKLATLSFYRFTQRLTHMGYKYGTEVVNVNEYLTTKTCSNCGKIKDLGASKIYECESCGMYADRDENAAKNILKVGLKPWYKQK

SEQ ID NO: 5013 - protein, 663 aa, Mimivirus terra2
IFINSPNYIRMDDPDDPNDRPFLSCIKNSLKTITKDVNGFQQVVFDSVERTSKIVSQIYFFLKLYMIHLDNIGCDFPKINEQLIRDITNLITSKNETKGKKPSVNILLEHFYNGFFKNLLKKEDIVCRDKLKYILNYEEKDIIKNIETNIKEHYIKHLIFFLKVKFGVFKVIDRINNNKDLAKDEKKKRRAYVYHQLNCIIHDIVSKPLTQFKSRDKFHDSILFLREFLIPKKDKYVKDNIAYDVKMYPQDYLKSMFRINSLLEDINDKIISKHTDPTTNPPLYKLFNPIPLRKSFIPKYITIDTPTLIGFQITKGLSKYITKTGQSAVQKLIWSQYFKTNTKHFKRNGYTFNHIIKTDGVGVSIVFHKIDINGNKVKIPPKYVLNNMTFEAKIPYIENTIINNDLLNKEIVVCDPGKNDLGNFMKKDIDGNPVYFKYTQKERNHHTKKRKYQSIEQQLSQTVFNGKTVKEIESELCDYSSKSSDFDRFQDYVVAKLKINRLLQNHYKKFIYRKLNWNRFINRNRNEDITLNKFQNRMGTPSEVSVVFGDWSDKEGFKGREPSISKRLKRLFVKRGYKCFLINEYNTSKLCSHCHNETSSLVVNGQDIWKLKECKTCGSIHDRDHNATKNMMFIVDELLEGRQRPVIFKKPVIELNPPLICEV

SEQ ID NO: 5014 - protein, 491 aa, Mimivirus terra2
IVCYFYLILMVYNQDLSISNKTCGISDWLPPIRNKKTSDIKSNSWFDIRRCLNPNIKTKFVPVNNKQIVLKEPNCIYLKYDLITLNPSSDHIRILREWFSMYAKIYNHAINLIRKMFYVNNKLIKSKLQHEIYDEIIVRKLSNDKTKLNESLKLSDRPPEFLLDYAISHACTYCNSQVKKYLKDSKNPYNKKTLRFRLWSLHKSRRVMHIFPPKLCDKAVCNGLFLKLNPSKNIHDIYMFCVMSWDRLTGKFFVYKPVLKRLYNIPKKQFMRCGIDPGVRTFLTLYSSERTYDVCDSTFYNNKIKRMWRKIDRINFLLHNRKKRKKRKNDRRLRKSLAKYYRKIRQRIKDLHTKTAKYLVSRYKEIYIGIYDTSKNLSDPRISFYEKRRIATLNHELFLTRLQQVADRFGSSVFAINEHMTTKTCSKCGRINEIGSSKVHKCACGMYAGRDENAAKNILKKGIKEHYLSAQSDKNVTEYNNKKSNKTNKET

SEQ ID NO: 5015 - protein, 366 aa, Pandoravirus inopinatum
PGRNRRRYQDRPLWRRAHADVQTLTGGRSTEMRPRQVKPPDRNRPRQSFSIDAKTTSKTNPYTVRWDSKECREGSCVLFMRQKVALWGCPSKRKRQLDRLTARMPGGEQASRTQTTLRYADGRYHLMIQCLSDKVPLRDRRPVRAVALDPGVRTFMASYDMDGRFGAVGDGQIGRITKVAQRADRIKSHIDTQLVNQGFANGDNNKGRRKRARKRVRQLNAKCRDLKVDAHWKTAKALCQRYDHILLPKFNSRGASQVLSKTTTRQMLHWSHYEFRQRLQHKAEAMGVKVHLVSEHYSSMTCGRCLYIEESFRKNASKWFECRNCGYVIDRDSNGARNILLMNAERYIGRLEAFPLGSDTGAAAAN

SEQ ID NO: 5016 - protein, 642 aa, Tipula oleracea nudivirus
MKRLIEINKKLEKITNQKCFLSNFCKSSIVFDAINKQVIEMSNFVIEASIYCHYKLNTYLLQGKVDVLLQSSRFILDMFYELKQKSKAKYQLEPDYEFIRNDYNLNKYKVVCGNSMNFLATQYETILKNNIWMHAYSRIRKFFKNATKVDAHVYTPTVIYQTLDTLFNKKSQHSTNEYLIELLKNELQFDIGNFHDIEKYPLKYIPLFYNLQKYNELNNIKNFKLFPQITAGRKYIRYDSFALFSLLASLKLLERGHTTWYGFAPEAMNYWRKYFKVEKFETGNKKFGKSISTDGIGVSIQLVREIIHATIDDDDDETMKKKRKIKKPKVSYQQDYNNLNLDDFTRYLGIDPGERLMLGGIIKNKEGVFTPLKCKSTTFRYDTGEISRRNRLIKYTTDHDIKQYEKEHENITQTNEPYNKVSDTMQKFINDSIKAKRKKKQKPSPKNKSLLDMENINEKLKVNISYNPSNYINYTKWRLKWLLYLQQLYCKKKVARLKMEAYMRIEKTLHKYKEQLAPSNEKTLIVWGDATIAANSPVKGYIRTPKNKLLEILKQNKNCKVLMQDEFRTTKLCCKCHEPLNISTDKHRYAVCPNCHTVFNRDVNAGANILKLVITRLKKEITHKNFCRSVKLTTITGSSFIV

SEQ ID NO: 5017 - protein, 608 aa, Lambdina fiscellaria nucleopolyhedrovirus
MSSCKSCGGESHSCRSSKSCANYLPPIRQRRNSGDVVHCTQDFDVGVVKRGLDGTICPLLQEGVRQRLTAEIRSDVVELSKLYILLGVFVNHCWNAYPDDESNSVRTFQDMMNYVYAIKGKGPHAQKFDDMVRYHGDIRRYDGRLRTFIVQELVKTYWTVLKTNITTHAYSRLARYFGVKRNDPTLFAAYYHKEFGEDDNISRVCRFINVSSDWHTTIPMWIEIQRDLYTRGEQSFVVFPQPSHGLKHVTYTSRGWHELLRRVDPSNITSSWPSITDHKKELWSPYLDTSVVDMKKFGCCIQTDGVAVSISMNRPKRMPIGRNKAASMLPKSYTIDAFFEDRIVAVDPGSRVPVAACDSRTGFRRITKRWVRSHTLEWKRDRYRSRKLRRVELDEAADRQRVELDRGVQLTCRNGEQVKLYTDFRLKWFDARQRPFERTRKLTRLSFNKYIMMARTNERIVKETFLNDAPSDRVLVLYGAGVNFVNVACYSGRKFKHTDLLRRLRSKRNIRVRLVDESYTSKACSDCNELRNGTYTRLRMNHRLRRGVCPDCNADVERDYNAAKNILVYYQRFAVCRPSPSRSSGVATDTDSHSVRSLFQCAVSEFGS

SEQ ID NO: 5018 - protein, 406 aa, Kaumoebavirus
MREELGNLIKGIPNSRVLYPFCGEGTVDLNCRIKSEPDWLGDTIIRCKKVVLHLEDHQRNIIEGWFEVYRQVYNFTLKCIKGKEKVSFYDLRKEVKGKFPKGLVNLVKKSKIPANTVDGAINDVVKARKIAISNILVGNIKHFRLRPKKISKKVNTIVLESNAFSDKCDSFCTRALGKKIRSTDIIQGIDKTCRLTWKKGYINPFILHVPEDRPKLIVKNKREMCSLDPGIRTFQTLYDTERYVEIGKRAAKKLEHHLDRIHKNKEHQKEKWYKKLSNRLYDKIKHTIDDLHYKTANFLCRSYKKIFIGDMSTKGIVRTGGNLNGSTKDLTHILSHYTFRMRLIEKAEQYNSEVIVVDEAYTSKTCGGCGKINENLGGAKRFNCSCGINCDRDLNGARNIMIKGLY

SEQ ID NO: 5019 - protein, 374 aa, Kaumoebavirus
MGDTIIRSKKVVLHLEDNQRNIIEGWFEVYRQVYNFTLKCIKGKDKVSFYGLRKEVKNKFPEGLVKLIKESKIPAHTVDNAIHDVVKARKAAISNILVGNIKYFRLRPKRISKKVNTIVLEASAFSDKYESFCISVLGKKIRSTDILQGIDKDCRLTWRKGYVKPFVLYVPEDRYKVVVKNKREICSLDPGIRTFQTLYDTERYVEIGKGAAKNLEKYLDKIHKGKEHQKERWYKKLSNRLYDKIKHTIDDLHYKTANFLCRNYKKILIGNMSTKGIVRTGGNLNRSTKDLTHILSHYTFRMRLIEKAEQYNSEVIVVDEAYTSKTCGGCGKINENLGGSKIFTCSCGVNCDRDLNGARNIMLKGLYELIESNE

SEQ ID NO: 5020 - protein, 606 aa, Heliothis virescens ascovirus 3f
MQLSCKSCGGEGHSRRSSKSCANYLPPIRQRRNSGDVDHCTQDFDVGVVKQGLDGTICPLLREDVRQRLTAEIRSDVVELSKLYILLGVFVNHCWNAYPDDESNSVRTFQDMMNYVYALKGKGPHAQKFDDMVRYHGNIRRYDGRLRTFIVQEVAKTYWTVLKTNISRHAYSRLARYFGVKRNDPTLFAAYYHKEFGDDDSISRVCRFINVSSDWHSTIPMWIEIQRDMYARGEQSFVIFPQPGHGLKHVSYTSRGWHELLRRVDPSNVTSNWTSITDHKKELWVPYLDTCVVDMKKFGCCIQTDGVAVSISMNRPKIMPIRRKAALPKSYTIDAFFEDRIVAVDPGSRVPVAACDSRAGFKRITKRWVRSHTLEWKRDRYRSRKLRRVELDEAADRQRVELDRGVQITCRNGEQVKLYTDFRLKWFDARQRPFERTRKLTRLSFNKYMMTARTNERIVRETFLSDAPSDRVLVLYGAGVNFVNVACYSGRKFKHTDLLRRLRAKRNIRVRLIDESYTSKACSDCNELRNGTYTRLRMNHRLRRGVCPDCNADVERDYNAAKNILVNYQRSAICRPSPSCDSGVATDTDPHSVRSIFQCAAIEPGS

SEQ ID NO: 5021 - protein, 312 aa, Heliothis virescens ascovirus 3f
MKKFGCCIQTDGVAVSISMNRPKIMPIRRKAALPKSYTIDAFFEDRIVAVDPGSRVPVAACDSRAGFKRITKRWVRSHTLEWKRDRYRSRKLRRVELDEAADRQRVELDRGVQITCRNGEQVKLYTDFRLKWFDARQRPFERTRKLTRLSFNKYMMTARTNERIVRETFLSDAPSDRVLVLYGAGVNFVNVACYSGRKFKHTDLLRRLRAKRNIRVRLIDESYTSKACSDCNELRNGTYTRLRMNHRLRRGVCPDCNADVERDYNAAKNILVNYQRSAICRPSPSCDSGVATDTDPHSVRSIFQCAAIEPGS

SEQ ID NO: 5022 - protein, 608 aa, Heliothis virescens ascovirus 3g
MPPSCKSCGGEGHSRRSSKSCLNYLPSIRQRSNCDDVSTEDFDVGVVKRGLNGVLCPLLDEDVRRRLTAEIRSDVVELSRLYVLLGVFVNHCWNAYPDNESNGVRTFQDMMNYVYALKGKGPHAHKFDDMVRYHDGITYYNGRLRNYSVQEMAKTYWTVLKTNITTHAYSRLARYFGVKRNDPTLFAAYYHKEFGDDDISRVCRFINVSSDWHSTIPMWIEIQREMYARGEQSFIIFPQPSHGLKHVTYTSRGWHELLRRVTPSNITSNWPSITDHKKDLWAPYLDTSVVDMKKFGCCIQTDGVAVSLSINRPKSKPASRKKPISTLPKSYVTDTFNEDRIVAVDPGSRVPVAACDSRTGFKRITKRWVRSHTLEWKRDRYRSRKLRKIELDEAVDRYRIELDRGVQITCRNGHQVKLYTDFRLKWFDARQRPYERMRKLTRLSFDKYMMTARTNERIVRETFLGDTPSDRVLVLYGAGVNFVNVACYSGRKFKHTDLLRRLRSRRNIKVRLVDESYTSKACSDCNELRNGTYTRLRMNHRLRRGVCPDCNADVERDYNAAKNILINFQRSAVCRPSPSCESGVTTDKDPHSMTIRSIFQCAVSELGS

SEQ ID NO: 5023 - protein, 608 aa, Heliothis virescens ascovirus 3g
MPPSCKSCGGEGHCRRSSKSCLNYLPSIRQRSNCDDVSTEDFDVGVVKRGLNGVLCPLLDEDVRRRLTAEIRSDVVELSRLYVLLGVFVNHCWNAYPDDESNGVRTFQDMMNYVYALKGKGPHAQKFDDMVRYHDGITYYNGRLRNYSVQEMAKTYWTVLKTNITTHAYSRLARYFGVKRNDPTLFAAYYHKEFGDDDISRVCRFINVSSDWHSTIPMWIEIQREMYARGEQSFVIFPQPSHGLKHVIYTSRGWHELLRRVTPSNITSNWPSITDHKKELWAPYLDTSVVDMKKFGCCIQTDGVAVSLSMNRPKRKPALRKKPISTLPKSYVTDTFNEDRIVAVDPGSRVPVAACDSRTGFKRITKRWVRSHTLEWKRERYRSSKLRKIELDEAVDRHRIELDRGVQITCRNGHQVKLYTDFRLKWFDARQRPFERTRKLTRLSFDKYMMTARTNERIVRETFLGDTPSDRVLVLYGAGVNFVNVACYSGRKFKHTDLLRRLRTKRNIRVRLVDESYTSKACSDCNELRNGTYTRLRMNHRLRRGVCPDCNADVERDYNAAKNILVNFQRSAVCRPSPSCASGVTTERDSHSMTIRPIIQCAVSELGS

SEQ ID NO: 5024 - protein, 606 aa, Heliothis virescens ascovirus 3g
MPPSCKSCGGEGHSRRSSKSCLNYLPSIRQRSNCDDVSTEDFDVGVVKRGLNGVLCPLLDEDVRRRLTAEIRSDVVELSRLYVLLGVFVNHCWNAYPDNESNGVRTFQDMMNYVYALKGKGPHAHKFDDMVRYHDGITYYNGRLRNYSVQEMAKTYWTVLKTNITTHAYSRLARYFGVKRNDPTLFAAYYHKEFGDDDISRVCRFINVSSDWHSTIPMWIEIQREMYARGEQSFVIFPQPSHGLKHVTYTSRGWHELLRRVTPSNITSNWPSITDHKKELWAPYLDTSVVDMKKFGCCIQTDGVAVSLSMNRPKRKPALRKKPTSIPPEPYITDTFNEDRIVAVDPGSRVPVAACDSHTGFKRITKRWVRSHTLEWKRERYRSRKLRRVELDEAEDRHRVELDMGVQITCRNGHRVKLYTDFRLKWFDARQRPFERTRKLTRLSFDKYVMTARTNERIVRETFLGDTPSDRVLVLYGAGVNFVNVACYSGRKFKHTDLLRRLRSRRNIRVRLVDESYTSKACSDCNELRNGTYTRLRMNHRLRRGVCPDCNADVERDYNAAKNILVNFQRSAVCRPSPSCDSGVTTDRDSHSIRPIIQCAVIELGS

SEQ ID NO: 5025 - protein, 608 aa, Heliothis virescens ascovirus 3g
MPPSCKSCGGEGHSRRSSKSCLNYLPSIRQRSNCDDVSTEDFDVGVVKRGLNGVLCPLLDEDVRRRLTAEIRSDVVELSRLYVLLGVFVNHYWNAYPDNESNGVRTFQDMMNYVYALKGKGPHAQKFDDMVRYHDGITYYNGRLRNYSVQEMAKTYWTLLKTNITTHAYSRLARYFGVKRNDPTLFAAYYHKEFGDDDISRVCRFINVSSDWHSTIPMWIEIQREMYARGDQSFVIFPQPSHGLKHVTYTSRGWHELLRRVTPSTVTSNWPSITDHKKELWAPYLDTSVVDMKKFGCCIQTDGVAVSLSMNRSKRKPILRKKPISTLPKSYVTDTFNEDRIVAVDPGSRVPVAACDSHTGFKRITKRWVRSHTLEWKRERYRSRKLRRVELDEAVDRHRVELDMGVQITCRNGHQVKLYTDFRLKWFDARQRPFERTRKLTRLSFDKYMMTARTNERIVKDTFLGDTPSDRVLVLYGAGVNFVNVACYSGRKFKHTDLLRRLRSRRNITVRLVDESYTSKACSDCNELRNGTYTRLRMNHRLRRGVCPDCNADIERDYNAAKNILVNFQRSAVCRPSPSCDSGVTTERDPHSMTIRSIFQCAVSELGS

SEQ ID NO: 5026 - protein, 571 aa, unidentified
  source 1..571: note = Trichoplusia ni granulovirus LBIV-12
MPLCKSCGGLDHQRRTSTKCANYLPQVRKRKLEPHQENLELQIYVVKRGLQSALCPLLSDEDRNKLLYEIRRDVRDLSRVYIELGIVMNYYMKRCDVLPDKPDVLNFFYAMKGKGPYAACYKHLAGDRVYDGKLRSFVVQELAKQYETLIHTNIETHAYSRLAKYFGVKKNHEGLFQAYYKKDFSHATEEMKQICQVINAESCKKDWWNTIPLWLKIQQELFDRDKVESFRLFPQPSYGLKHLTYTSRGWHELLRRVKPDTTPSSWMSIDDHIKELWAPWLKSTKNFGCCLQTDGVSVSLSMNRWVKKVTKNGETKEVVIKKWKPSYDKLIAVDPGSRIPVAAYNSNGVYQRITSKYVKSHSLEWKRERVRSKLTKSSEQAEAKDRERVQAACSIVLSSKNTSHVVEYTVFRLKWFNVRQQPYETHLKLTRLRFDKYINTGKVQEKIVKQVFDGGGMEKTLVLYGAGSHFMNTAQFSGRKFKHNALLKKLRQKRNIHVEIVDESYTSQACSACNYKTGQFSKISMDHKRRRGVCPNCSSSFDRDQNAAKNILINYLRSAVCRPRCSIRRVS

SEQ ID NO: 5027 - protein, 409 aa, Heterosigma akashiwo virus 01
MKRRSNPKKPNSQTIYYPLSTSSVVNNWEKNVIKNLKVRIYPTPTQRKIFKEWFGTTRYVYNRVIDAVENKGEKNNAYELRNKYVTSKNNSNVNEWEKRTPMNVRTNTVLKLSSNYKSAFSNLKNGNIVRFKMRFKSKKDRSQALLLPKSSVEMKNGSMTIGKHSISKFWSSDRKGDKYAFSKFKLKGKTKKRDINIDSQCTLTYDGLYYHVLIPKKTRPKKVQKRCENTIVALDPGLRKFQTGFSQSEIFTVERTAMLKKYNKRISYLHGKFQRNNTRKILKTYRRSANIVSDIHWKLITYLTDNYEHVLIPKFESQELQKITMSKHSNRLYDTYKHYLFKQRLIEKSKEKINTRVYVVNEAYTSVTCTNYGTINAKTRSEMSTCKTCKLLSDRDIRGSRNIFIKYVQ

SEQ ID NO: 5028 - protein, 308 aa, Heterosigma akashiwo virus 01
MNVRANTVLKLSSNYKSAFSNLKNGNIVRFKMRFKSKKDRSQALFLPKSSIEMKNGSMTIGKHSISKFWSSERKGDKYAFSKFKLKGKTKKRDINIDSQCTLTYDGLYYHVLIPKKTRPKKVQKRCENTIVALDPGLRKFQTGFSQSEIFTVERTAMLKKYNKRISYLHGKFQRNNTRKILKTYRRSANIVSDIHWKLITYLTDNYEHVLIPKFESQELQKITMSKHSNRLYDTYKHYLFKQRLIEKSKEKINTRVYMVNEAYTSVTCTNCGTINAKTRSEMSTCKTCKLLSDRDIRGSRNIFIKYVQ

SEQ ID NO: 5029 - protein, 664 aa, Pandoravirus neocaledonia
MASRPSRPGADRQEPRRPFWFDAARTPYLARHLPYEPDTGSPKVSLHGHCNSGWIRAEASARSTAAPAVKFRVTHPPEPTLAEARAAAKANRASKRAKTAKAVKTKDVPRRIFSLRLDPTPAQKRFFQRAIGIACLAKRLAYKHVGDQRQPMTAKRINDLKKRICTEHFQTRVMTGETSAKGNARFQKQNAEQPNAFLPEGTRRRLYEQDLRERAKAHRGAVEAAWCARRGWKKSRKTWTPPLDHRPIPAVVRCNAVIRFCQSVSSTQALMQEQAAKWDARMAASQPRSSPSSSSSTARRTDVSSARGKRKQTEMSSASPAPRAPTNPRPCMGPRQVKATDRNRPHQTFSIDATPGNANPHAARWDFKGDDRVHLMGIAVRLWGRPAKRRRELDRLSSRMPDGERFTDQRVIVRYESGRYHLLVQCLFSEPPKRADIAGRPVSAVALDPGARTFHGTYDLDGRFGEIGAGQIRRIIRIAKKADRIKSHIDRNLKDRRPGDHNKAKRKRARRKVRAIMLKTRDLKSDAHWKVAKALCERYDHVLIPRLPVSVMVRALARSTTRQMMHWSHYEFRQRLHHKAAQLGVHVHEVSEAYTSMTCGRCLWIEESFRRNSSKQFACRRCGHTADRDLNAARNIMLKTIEASVGTLEASILQPPSTSPTSRG

SEQ ID NO: 5030 - DNA, 129 bp, Acanthamoeba polyphaga mimivirus
  source 1..129: mol_type = genomic DNA
tttaacctcctaagacccaatgtactttatataggacgctgagtgtatgcgattttagactctacgtcaaatctcttatcagctaatgatgagtataaaagcgagcaccgctcgcactaattagttact
